(19) United States
(12) Patent Application Publication
(10) Pub. No.: US 2021/0024907 A1
(43) Pub. Date: Jan. 28, 2021

(54) NUCLEIC ACID-BASED THERAPEUTICS

(71) Applicant: Factor Bioscience Inc., Cambridge, MA (US)

(72) Inventors: Matthew ANGEL, Cambridge, MA (US); Christopher ROHDE, Cambridge, MA (US); Simon MOORE, Cambridge, MA (US); Franklin KOSTAS, Cambridge, MA (US); Jasmine HARRIS, Cambridge, MA (US)

(21) Appl. No.: 17/041,787

(22) PCT Filed: Mar. 27, 2019
(86) PCT No.: PCT/US19/24443

§ 371 Date: Sep. 25, 2020

Related U.S. Application Data
(60) Provisional application No. 62/648,785, filed on Mar. 27, 2018.
(60) Provisional application No. 62/758,437, filed on Nov. 9, 2018.

(51) Int. Cl. C12N 9/22; A61K 9/127; C07K 14/50; C07K 14/54; A61P 37/06; A61P 25/00

(52) U.S. Cl. CPC C12N 9/22; A61K 9/127; C07K 14/503; C07K 14/54; A61K 48/00; A61P 25/00; C12N 2310/20; C12N 2800/80; A61P 37/06

(57) ABSTRACT

The present invention relates in part to nucleic acids, including nucleic acids encoding proteins, therapeutics and cosmetics comprising nucleic acids, methods for delivering nucleic acids to cells, tissues, organs, and patients, methods for inducing cells to express proteins using nucleic acids, methods, kits and devices for transfecting, gene editing, and reprogramming cells, and cells, organisms, therapeutics, and cosmetics produced using these methods, kits, and devices.

### PRIORITY

[0001] This application claims priority to U.S. Provisional Patent Application No. 62/648,785, filed Mar. 27, 2018 and to U.S. Provisional Patent Application No. 62/758,437, filed Nov. 9, 2018. The entire contents of the aforementioned patent applications are incorporated herein by reference.

### DESCRIPTION OF THE TEXT FILE SUBMITTED ELECTRONICALLY

[0002] The instant application contains a Sequence Listing which has been submitted in ASCII format via EFS-Web and is hereby incorporated by reference in its entirety. Said ASCII copy, created about Mar. 27, 2019, is named “FAB-011PC_ST25.txt” and is about 11.5 MB in size.

### FIELD OF THE INVENTION

[0003] The present invention relates, in part, to methods, compositions, and products for producing and delivering nucleic acids to cells, tissues, organs, and patients, methods for expressing proteins in cells, tissues, organs, and patients, and cells, therapeutics, and cosmetics produced using these methods, compositions, and products.

### BACKGROUND

[0004] Ribonucleic acid (RNA) is ubiquitous in both prokaryotic and eukaryotic cells, where it encodes genetic information in the form of messenger RNA, binds and transports amino acids in the form of transfer RNA, assembles amino acids into proteins in the form of ribosomal RNA, and performs numerous other functions including gene expression regulation in the forms of microRNA and long non-coding RNA. RNA can be produced synthetically by methods including direct chemical synthesis and in vitro transcription, and can be administered to patients for therapeutic use. However, previously described synthetic RNA molecules are unstable and trigger a potent innate-immune response in human cells. In addition, methods for efficient non-viral delivery of nucleic acids to patients, organs, tissues, and cells in vivo have not been previously described. The many drawbacks of existing synthetic RNA technologies and methods for delivery of nucleic acids make them undesirable for therapeutic or cosmetic use.

[0005] Accordingly, there remains a need for improved methods and compositions for the production and delivery of nucleic acids to cells, tissues, organs, and patients.

### SUMMARY OF THE INVENTION

[0006] The present invention provides, in part, compositions, methods, articles, and devices for delivering nucleic acids to cells, tissues, organs, and patients, methods for inducing cells to express proteins, methods, articles, and devices for producing these compositions, methods, articles, and devices, and compositions and articles, including cells, organisms, cosmetics and therapeutics, produced using these compositions, methods, articles, and devices. Unlike previously reported methods, certain embodiments of the present invention provide small doses of nucleic acids to achieve significant and lasting protein expression in humans.

[0007] An aspect of the present invention is a method for treating a disease or disorder caused by a mutation in a gene, the method comprising administering to a subject in need thereof and comprising the mutation in the gene an effective amount of a synthetic RNA encoding a gene-editing protein capable of creating a single-strand or double-strand break in the gene, wherein the single-strand or double-strand break causes persistent altered splicing of the gene.

[0008] In embodiments, the altered splicing results in expression of a truncated protein which lacks at least the polypeptide sequence corresponding to an exon containing the mutation.

[0009] In embodiments, the single-strand or double-strand break removes a splice acceptor site or produces a non-functional splice acceptor site in or near an exon of the gene or removes a splice donor site or produces a non-functional splice donor site in or near an exon of the gene.

[0010] In embodiments, the gene-editing protein creates a non-functional splice acceptor site that is within about 1 kb or about 0.5 kb or about 0.1 kb of the exon.

[0011] In embodiments, the mutation causes altered splicing of the gene and the single-strand or double-strand break causes the expression of a functional gene product.

[0012] In embodiments, the mutation inactivates a splice acceptor site or a splice donor site and the single-strand or double-strand break restores a functional exon.

[0013] In any of the preceding embodiments and aspect, the single-strand or double-strand break is within about 1 kb or about 0.5 kb or about 0.1 kb of the exon.

[0014] In any of the preceding embodiments and aspect, the non-functional splice acceptor site causes excision of the exon when a pre-mRNA comprising the exon is processed into mRNA.

[0015] In embodiments, the gene-editing protein creates a non-functional splice donor site in an intron that is within about 1 kb or about 0.5 kb or about 0.1 kb of the exon.

[0016] In any of the preceding embodiments and aspect, the non-functional splice donor site causes excision of the exon when a pre-mRNA comprising the exon is processed into mRNA.

[0017] In any of the preceding embodiments and aspect, wherein the exon comprises a mutation.

[0018] In embodiments, the mutation is a nonsense mutation, a frame shift mutation, or a mutation that introduces a premature stop codon.

[0019] In any of the preceding embodiments and aspect, wherein the mRNA is translated into a truncated protein which retains a function of the full-length protein.

[0020] In any of the preceding embodiments and aspect, wherein the exon encodes a polypeptide sequence comprising a peptide splice site.

[0021] In embodiments, the mRNA is translated into a polypeptide which lacks the peptide splice site.

[0022] In embodiments, the cleavage site is a protease cleavage site or a caspase cleavage site.

[0023] In any of the preceding embodiments and aspect, wherein the exon encodes a polypeptide sequence comprising a cleavage site.

[0024] In embodiments, the mRNA is translated into a polypeptide which lacks the cleavage site.

[0025] In any of the preceding embodiments and aspect, the truncated protein possesses a function of the wild-type protein.

[0026] In any of the preceding embodiments and aspect, the gene-editing protein is selected from a TALEN, a meganuclease, a nuclease, a zinc finger nuclease, a CRISPR-associated protein, CRISPR/Cas9, Cas9, xCas9, Cas12a (Cpf1), Cas13a, Cas14, CasX, CasY, a Class 1 Cas protein, a Class 2 Cas protein, and MAD7.

[0027] In any of the preceding embodiments and aspect, the gene-editing protein comprises: (a) a DNA-binding domain comprising a plurality of repeat sequences and at least one of the repeat sequences comprises the amino acid sequence: LTPvQWAIAwxyzGHGG (SEQ ID NO: 629), wherein: “v” is Q, D or E, “w” is S or N, “x” is H, N, or I, “y” is D, A, I, N, G, H, K, S, or null, and “z” is GGKQALETVQRLLPVLCQD (SEQ ID NO: 630) or GGKQALETVQRLLPVLCQA (SEQ ID NO: 631); and (b) a nuclease domain comprising a catalytic domain of a nuclease.

[0028] In embodiments, the nuclease domain is capable of forming a dimer with another nuclease domain.

[0029] In any of the preceding embodiments and aspect, the nuclease domain comprises the catalytic domain of a protein comprising the amino acid sequence of SEQ ID NO: 632.

[0030] In any of the preceding embodiments and aspect, at least one of the repeat sequences comprising the amino acid sequence LTPvQWAIAwxyzGHGG (SEQ ID NO: 629) is between 36 and 39 amino acids long.

[0031] In any of the preceding embodiments and aspect, the gene is selected from ABCA4, ADAMTS-13, APP, ATP6AP2, CEP290, COL17A1, COL4A3, COL4A4, COL4A5, COL6A1, COL6A2, COL6A3, COL7A1, DMD, DMD, FUS, FXN, GABRG2, HNRPDL, HTT, IKBKAP, ITGA6, ITGB4, LAMA3, LAMB3, LAMC2, LMNA, LMNA, LMNA, LMNA, LMNB1, MAPT, PINK1, PRPF6, RBM20, RNU4ATAC, SMN1, SNRNP200, TARDP, TCF4, TTN, U2AF1, USH2A, and USH2A.

[0032] In any of the preceding embodiments and aspect, a gene, the sequence identifier (SEQ ID NO) for its NCBI Reference Sequence, a mutation or mutations therein, the intron or introns that are associated with diseases, and/or the exon or exons that are associated with diseases which can be treated by the method is selected from the list Table 2.

[0033] In any of the preceding embodiments and aspect, the disease or disorder is selected from Alport Syndrome, Alport Syndrome, Alport Syndrome, Alzheimer's disease, Amyotrophic lateral sclerosis (ALS), Autosomal dominant leukodystrophy (ADLD), Becker muscular dystrophy (BMD), Bethlem myopathy and Ullrich scleroatonic muscular dystrophy, Dilated cardiomyopathy (DCM), Duchenne muscular dystrophy, Dystrophic Epidermolysis Bullosa, Early-onset Parkinson disease (PD), Epidermolysis Bullosa (EB), Familial dysautonomia (FD), Familial partial lipodystrophy type 2 (FPLD2), Febrile seizures (FS); childhood absence epilepsy (CAE), generalized epilepsy with febrile seizures plus (GEFS+), and Dravet syndrome (DS)/severe myoclonic epilepsy in infancy (SMEI), Friedreich ataxia, Frontotemporal dementia with parkinsonism chromosome 17 (FTDP-17), Fuchs endothelial corneal dystrophy (FECD), Huntington's Disease, Hutchinson-Gilford progeria syndrome (HGPS), Junctional Epidermolysis Bullosa, Leber's congenital amaurosis (LCA), Limb girdle muscular dystrophy type 1B (LGMD1B), Limb-girdle muscular dystrophy 1G (LGMD1G), Microcephalic osteodysplastic primordial dwarfism type 1 (MOPD I), Myelodysplastic syndromes (MDS), Retinitis pigmentosa (adRP), Spinal muscular atrophy (SMA), Stargardt disease, Thrombotic thrombocytopenic purpura (TTP), Ushers syndrome type I, Ushers syndrome type II, Various myopathies and dystrophies, a wound, and X-linked parkinsonism with spasticity (XPDS).

[0034] In any of the preceding embodiments and aspect, a single administration of the effective amount of the synthetic RNA encoding the gene-editing protein causes persistent altered RNA splicing of the gene.

[0035] An aspect of the present invention is a method for treating a neurodegenerative disease or central nervous system injury comprising administering to a subject in need thereof a synthetic RNA encoding a neurotrophic agent, a gene-editing protein, or an enzyme that cleaves a dysfunctional, an abnormally folding, and/or a disease-causing protein, wherein the neurotrophic agent, the gene-editing protein, or the enzyme treats the neurodegenerative disease or central nervous system injury.

[0036] In embodiments, the neurodegenerative disease is selected from: a motor neuron disease, a polyglutamine disease, a prion disease, a spinocerebellar ataxia, a trinucleotide repeat disorder, Alzheimer's disease, amyotrophic lateral sclerosis (ALS), ataxia telangiectasia, ataxia-oculomotor apraxia, Batten disease, Cockayne syndrome, dementia, familial encephalopathy, Huntington's disease, Lewy-body dementia, multiple system atrophy, Parkinson's disease, spinocerebellar ataxia type 1, spongiform encephalopathy, and xeroderma pigmentosum.

[0037] In embodiments, the central nervous system injury is selected from: concussion, diffuse axonal injury, diffuse brain injury, focal brain injury, hemorrhage, seizure, stroke, traumatic brain injury, traumatic encephalopathy, and traumatic head injury.

[0038] In any of the preceding embodiments and aspects, wherein the administering is by intravenous injection or infusion; intra-arterial injection or infusion; intrathecal injection or infusion; intracerebral injection or infusion; injection or infusion into a ventricle, including a lateral ventricle; injection or infusion into the hippocampus; injection or infusion into the striatum; or injection or infusion into one or more of: the putamen, the caudate nucleus, the substantia nigra, the cortex, the third ventricle, the spinal cord, or the basal ganglia.

[0039] In any of the preceding embodiments and aspects, wherein the synthetic RNA encodes a neurotrophic agent.

[0040] In embodiments, the neurotrophic agent is a neurotrophic protein selected from nerve growth factor (NGF), brain-derived neurotrophic factor (BDNF), neurotrophin-3 (NT-3), neurotrophin-4 (NT-4), the GDNF family of ligands, and ciliary neurotrophic factor (CNTF).

[0041] In embodiments, the neurotrophic protein is NGF and comprising the sequence of SEQ ID NO: 254, the neurotrophic protein is BDNF and comprising the sequence of SEQ ID NO: 561, the neurotrophic protein is NT-3 and comprising the sequence of SEQ ID NO: 255, the neurotrophic protein is NT-4 and comprising the sequence of SEQ ID NO: 256, the neurotrophic protein is CNTF and comprising the sequence of SEQ ID NO: 786, or the neurotrophic protein is GDNF family of ligands and comprising the sequence of SEQ ID NO: 787-793.

[0042] In embodiments, the synthetic RNA encodes a gene-editing protein that targets a safe harbor locus.

[0043] In embodiments, the synthetic RNA encodes a gene-editing protein that targets one or more of: AAVS1, CCR5, the human orthologue of the mouse Rosa26 locus.

[0044] In embodiments, the gene-editing protein inserts a functional copy of a gene into the subject's cells.

[0045] In embodiments, the inserted functional copy of a gene does not cause alterations of the subject's cell's genome which pose a risk to the subject.

[0046] In embodiments, the gene encodes a neurotrophic agent.

[0047] In any of the preceding embodiments and aspects, the gene encodes nerve growth factor (NGF), brain-derived neurotrophic factor (BDNF), neurotrophin-3 (NT-3), neurotrophin-4 (NT-4), the GDNF family of ligands, and ciliary neurotrophic factor (CNTF).

[0048] In embodiments, the NGF comprises the sequence of SEQ ID NO: 254, the BDNF comprises the sequence of SEQ ID NO: 561, the NT-3 comprises the sequence of SEQ ID NO: 255, the NT-4 comprises the sequence of SEQ ID NO: 256, the CNTF comprises the sequence of SEQ ID NO: 786, or the GDNF family of ligands comprises the sequence of SEQ ID NO: 787-793.

[0049] In any of the preceding embodiments and aspects, the gene is inserted downstream of one or more of: a simple promoter, a constitutive promoter, a strong promoter, an endogenous promoter, tissue-specific promoter, cell type-specific promoter, or a drug-inducible promoter.

[0050] In any of the preceding embodiments and aspects, the method induces neurogenesis.

[0051] In any of the preceding embodiments and aspects, the synthetic RNA encodes an enzyme that cleaves a dysfunctional, abnormally folding, and/or a disease-causing protein.

[0052] In embodiments, the dysfunctional, abnormally folding, and/or disease-causing protein forms a glial scar.

[0053] In any of the preceding embodiments and aspects, the dysfunctional, abnormally folding, and/or disease-causing protein is amyloid, tau, alpha-synuclein, or huntingtin.

[0054] In any of the preceding embodiments and aspects, the administering is by intravenous injection or infusion; intra-arterial injection or infusion; intrathecal injection or infusion; intracerebral injection or infusion; injection or infusion into a ventricle, including a lateral ventricle; injection or infusion into the hippocampus; injection or infusion into the striatum; or injection or infusion into one or more of: the putamen, the caudate nucleus, the substantia nigra, the cortex, the third ventricle, the spinal cord, or the basal ganglia.

[0055] In any of the preceding embodiments and aspects, the administering is directly to a target tissue.

[0056] In embodiments, the administering is directly to a site of disease or injury.

[0057] In any of the preceding embodiments and aspects, the synthetic RNA is not encapsulated in a viral particle.

[0058] In any of the preceding embodiments and aspects, the synthetic RNA is formulated in a liposome or lipid particle.

[0059] An aspect of the present invention is a method for treating and/or reducing pain comprising administering to a subject in need thereof an effective amount of a synthetic RNA encoding a gene-editing protein capable of creating a single-strand or double-strand break in a voltage-gated sodium channel type 1 (NaV1) gene, wherein the administering is directed to the central nervous system (CNS) or the peripheral nervous system (PNS).

[0060] In embodiments, the NaV1 is selected from NaV1.3, NaV1.7, NaV1.8, and NaV1.9.

[0061] In embodiments, the NaV1.3 is encoded by the SCN3A gene comprising the sequence of SEQ ID NO: 671, the NaV1.7 is encoded by the SC9N9A gene comprising the sequence of SEQ ID NO: 662, the NaV1.8 is encoded by the SCN10A gene comprising the sequences of SEQ ID NO: 672, and the NaV1.9 is encoded by the SCN11A gene comprising the sequences of SEQ ID NO: 673.

[0062] In any of the preceding embodiments and aspects, the administering is directed to neurons and/or glial cells of the CNS or PNS.

[0063] In any of the preceding embodiments and aspects, the administering is by intraganglionic injection, injection to the peripheral or central nerve roots, or injection in proximity to the dorsal root ganglion or nerve root.

[0064] In any of the preceding embodiments and aspects, the administering is directed into the parenchyma or the cerebrospinal spinal fluid of the central nervous system.

[0065] In any of the preceding embodiments and aspects, the synthetic RNA encoding a gene-editing protein is administered systemically and its penetrance to the CNS or PNS is increased by encapsulation in a viral or non-viral particle, by electrical stimulation, by acoustical stimulation, and/or by co-administration with a drug.

[0066] In any of the preceding embodiments and aspects, the RNA comprises or encodes a transport signal that directs the RNA or a protein product to a neuron's cell body or to a distal portion of the neuron.

[0067] In any of the preceding embodiments and aspects, the synthetic RNA encoding a gene-editing protein decreases expression of a wild-type or a mutant form of NaV 1.3, NaV 1.7, NaV 1.8, or NaV 1.9.

[0068] In any of the preceding embodiments and aspects, the synthetic RNA encoding a gene-editing protein increases expression of a wild-type or a mutant form of NaV 1.3, NaV 1.7, NaV 1.8, or NaV 1.9.

[0069] In any of the preceding embodiments and aspects, the synthetic RNA encoding a gene-editing protein increases enkephalins and/or glutamic acid decarboxylases in mesenchymal stem cells, thereby treating and/or reducing pain.

[0070] In any of the preceding embodiments and aspects, the methods further comprise administering electrical stimulation, a drug, and/or a cell therapy to increase efficacy.

[0071] In any of the preceding embodiments and aspects, the gene-editing protein is selected from a TALEN, a meganuclease, a nuclease, a zinc finger nuclease, a CRISPR-associated protein, CRISPR/Cas9, Cas9, xCas9, Cas12a (Cpf1), Cas13a, Cas14, CasX, CasY, a Class 1 Cas protein, a Class 2 Cas protein, and MAD7.

[0072] In any of the preceding embodiments and aspects, the gene-editing protein comprises: (a) a DNA-binding domain comprising a plurality of repeat sequences and at least one of the repeat sequences comprises the amino acid sequence: LTPvQWAIAwxyzGHGG (SEQ ID NO: 629), wherein: “v” is Q, D or E, “w” is S or N, “x” is H, N, or I, “y” is D, A, I, N, G, H, K, S, or null, and “z” is GGKQALETVQRLLPVLCQD (SEQ ID NO: 630) or GGKQALETVQRLLPVLCQA (SEQ ID NO: 631); and (b) a nuclease domain comprising a catalytic domain of a nuclease.

[0073] In embodiments, the nuclease domain is capable of forming a dimer with another nuclease domain.

[0074] In any of the preceding embodiments and aspects, the nuclease domain comprises the catalytic domain of a protein comprising the amino acid sequence of SEQ ID NO: 632.

[0075] In any of the preceding embodiments and aspects, at least one of the repeat sequences comprising the amino acid sequence LTPvQWAIAwxyzGHGG (SEQ ID NO: 629) is between 36 and 39 amino acids long.

[0076] In any of the preceding embodiments and aspects, the pain is post-surgical and/or chronic pain.

[0077] In any of the preceding embodiments and aspects, the synthetic RNA comprises one or more non-canonical nucleotides.

[0078] In embodiments, the one or more non-canonical nucleotides avoids substantial cellular toxicity.

[0079] In any of the preceding embodiments and aspects, the non-canonical nucleotides have one or more substitutions at positions selected from the 2C, 4C, and 5C positions for a pyrimidine, or selected from the 6C, 7N and 8C positions for a purine.

[0080] In any of the preceding embodiments and aspects, the non-canonical nucleotides comprise one or more of 5-hydroxycytidine, 5-methylcytidine, 5-hydroxymethylcytidine, 5-carboxycytidine, 5-formylcytidine, 5-methoxycytidine, pseudouridine, 5-hydroxyuridine, 5-methyluridine, 5-hydroxymethyluridine, 5-carboxyuridine, 5-formyluridine, 5-methoxyuridine, 5-hydroxypseudouridine, 5-methylpseudouridine, 5-hydroxymethylpseudouridine, 5-carboxypseudouridine, 5-formylpseudouridine, and 5-methoxypseudouridine, optionally at an amount of at least 50%, or at least 60%, or at least 70%, or at least 80%, or at least 90%, or 100% of the non-canonical nucleotides.

[0081] In any of the preceding embodiments and aspects, at least about 50% of cytidine residues are non-canonical nucleotides, and which are selected from 5-hydroxycytidine, 5-methylcytidine, 5-hydroxymethylcytidine, 5-carboxycytidine, 5-formylcytidine, and 5-methoxycytidine.

[0082] In any of the preceding embodiments and aspects, at least about 75% or at least about 90% of cytidine residues are non-canonical nucleotides, and the non-canonical nucleotides are selected from 5-hydroxycytidine, 5-methylcytidine, 5-hydroxymethylcytidine, 5-carboxycytidine, 5-formylcytidine, and 5-methoxycytidine.

[0083] In any of the preceding embodiments and aspects, at least about 20% of uridine, or at least about 40%, or at least about 50%, or at least about 75%, or at about least 90% of uridine residues are non-canonical nucleotides, and the non-canonical are selected from pseudouridine, 5-hydroxyuridine, 5-methyluridine, 5-hydroxymethyluridine, 5-carboxyuridine, 5-formyluridine, 5-methoxyuridine, 5-hydroxypseudouridine, 5-methylpseudouridine, 5-hydroxymethylpseudouridine, 5-carboxypseudouridine, 5-formylpseudouridine, and 5-methoxypseudouridine.

[0084] In any of the preceding embodiments and aspects, at least about 40%, or at least about 50%, or at least about 75%, or at about least 90% of uridine residues are non-canonical nucleotides, and the non-canonical nucleotides are selected from pseudouridine, 5-hydroxyuridine, 5-methyluridine, 5-hydroxymethyluridine, 5-carboxyuridine, 5-formyluridine, 5-methoxyuridine, 5-hydroxypseudouridine, 5-methylpseudouridine, 5-hydroxymethylpseudouridine, 5-carboxypseudouridine, 5-formylpseudouridine, and 5-methoxypseudouridine.

[0085] In any of the preceding embodiments and aspects, at least about 10% of guanine residues are non-canonical nucleotides, and the non-canonical nucleotide is optionally 7-deazaguanosine.

[0086] In any of the preceding embodiments and aspects, the synthetic RNA comprises no more than about 50% 7-deazaguanosine in place of guanosine residues.

[0087] In any of the preceding embodiments and aspects, the synthetic RNA does not comprise non-canonical nucleotides in place of adenosine residues.

[0088] In any of the preceding embodiments and aspects, the synthetic RNA comprises a 5′ cap structure.

[0089] In any of the preceding embodiments and aspects, the synthetic RNA comprises a Kozak consensus sequence.

[0090] In any of the preceding embodiments and aspects, the synthetic RNA comprises a 5′-UTR which comprises a sequence that increases RNA stability in vivo, and the 5′-UTR optionally comprises an alpha-globin or beta-globin 5′-UTR.

[0091] In any of the preceding embodiments and aspects, the synthetic RNA comprises a 3′-UTR which comprises a sequence that increases RNA stability in vivo, and the 3′-UTR optionally comprises an alpha-globin or beta-globin 3′-UTR.

[0092] In any of the preceding embodiments and aspects, the synthetic RNA comprises a 5′-UTR which comprises a microRNA binding site that modulates RNA stability in a cell type-specific manner.

[0093] In any of the preceding embodiments and aspects, the synthetic RNA comprises a 3′-UTR which comprises a microRNA binding site that modulates RNA stability in a cell type-specific manner.

[0094] In any of the preceding embodiments and aspects, the synthetic RNA comprises a 3′ poly(A) tail.

[0095] In any of the preceding embodiments and aspects, the synthetic RNA comprises a 3′ poly(A) tail which comprises from about 20 nucleotides to about 250 nucleotides.

[0096] In any of the preceding embodiments and aspects, the synthetic RNA comprises about 200 nucleotides to about 5000 nucleotides.

[0097] In any of the preceding embodiments and aspects, the synthetic RNA comprises from about 500 to about 2000 nucleotides, or about 500 to about 1500 nucleotides, or about 500 to about 1000 nucleotides.

[0098] In any of the preceding embodiments and aspects, the synthetic RNA is prepared by in vitro transcription.

[0099] In any of the preceding embodiments and aspects, the effective amount of the synthetic RNA is administered as one or more injections each injection comprising about 10 ng to about 5000 ng of RNA.

[0100] In any of the preceding embodiments and aspects, the effective amount of the synthetic RNA is administered as one or more injections each injection comprising no more than about 10 ng, or no more than about 20 ng, or no more than about 50 ng, or no more than about 100 ng, or no more than about 200 ng, or no more than about 300 ng, or no more than about 400 ng, or no more than about 500 ng, or no more than about 600 ng, or no more than about 700 ng, or no more than about 800 ng, or no more than about 900 ng, or no more than about 1000 ng, or no more than about 1100 ng, or no more than about 1200 ng, or no more than about 1300 ng, or no more than about 1400 ng, or no more than about 1500 ng, or no more than about 1600 ng, or no more than about 1700 ng, or no more than about 1800 ng, or no more than about 1900 ng, or no more than about 2000 ng, or no more than about 3000 ng, or no more than about 4000 ng, or no more than about 5000 ng of RNA.

[0101] In any of the preceding embodiments and aspects, the effective amount of the synthetic RNA is administered as one or more injections each injection comprising about 10 ng, or about 20 ng, or about 50 ng, or about 100 ng, or about 200 ng, or about 300 ng, or about 400 ng, or about 500 ng, or about 600 ng, or about 700 ng, or about 800 ng, or about 900 ng, or about 1000 ng, or about 1100 ng, or about 1200 ng, or about 1300 ng, or about 1400 ng, or about 1500 ng, or about 1600 ng, or about 1700 ng, or about 1800 ng, or about 1900 ng, or about 2000 ng, or about 3000 ng, or about 4000 ng, or about 5000 ng of RNA.

[0102] In any of the preceding embodiments and aspects, the effective amount of the synthetic RNA comprises one or more lipids and/or polymers to enhance uptake of RNA by cells.

[0103] In any of the preceding embodiments and aspects, the effective amount of the synthetic RNA comprises a cationic liposome and/or cationic polymer formulation.

[0104] In embodiments, a lipid and/or a polymer of the cationic liposome formulation is selected from Table 1.

[0105] An aspect of the present invention is a method of polynucleotide delivery to the central nervous system, comprising a synthetic polynucleotide formulated with a liposome comprising one or more lipids selected from Table 1.

[0106] In embodiments, the polynucleotide is a synthetic RNA.

[0107] In any of the preceding embodiments and aspects, the liposome comprises 1,2-dioleoyl-3-dimethylammonium-propane (DODAP).

[0108] In embodiments, the liposome further comprises one or more helper lipids, optionally selected from dioleoyl phosphatidyl ethanolamine (DOPE), 1,2-distearoyl-sn-glycero-3-phosphocholine (DSPC), and cholesterol.

[0109] In any of the preceding embodiments and aspects, the liposome further comprises a PEGylated lipid.

[0110] In any of the preceding embodiments and aspects, the subject in need is a human.

[0111] In any of the preceding embodiments and aspects, the effective amount of the synthetic RNA is administered about weekly, for at least 2 weeks.

[0112] In any of the preceding embodiments and aspects, the effective amount of the synthetic RNA is administered about every other week for at least one month.

[0113] In any of the preceding embodiments and aspects, the effective amount of the synthetic RNA is administered monthly or about every other month.

[0114] In any of the preceding embodiments and aspects, the effective amount of the synthetic RNA is administered for at least two months, or at least 4 months, or at least 6 months, or at least 9 months, or at least one year.

[0115] In any of the preceding embodiments and aspects, the synthetic RNA comprises 5-methoxyuridine.

[0116] An aspect of the present invention is a composition comprising an effective amount of the synthetic RNA used in the method of any one of the above aspects or embodiments.

[0117] In embodiments, having an injection volume of less than about 1 mL, less than about 0.5 mL, less than about 0.2 mL, less than about 0.1 mL, less than about 0.05 mL, less than about 0.02 mL, less than about 0.01 mL, less than about 0.005 mL, less than about 0.002 mL, or less than about 0.001 mL.

[0118] An aspect of the present invention is a pharmaceutical composition, comprising the composition of any of the preceding embodiments and aspects and a pharmaceutically-acceptable excipient.

[0119] In embodiments, use of the composition of any of the preceding embodiments and aspects, or the pharmaceutical composition of any of the preceding embodiments and aspects in the treatment of a disease or disorder described herein.

[0120] In embodiments, use of the composition of any of the preceding embodiments and aspects, or the pharmaceutical composition of any of the preceding embodiments and aspects in the manufacture of a medicament for the treatment of a disease or disorder described herein.

[0121] An aspect of the present invention is a composition comprising a synthetic RNA used in the method of any one of the preceding embodiments and aspects and formulated with one or more lipids and/or polymers selected from Table 1.

[0122] An aspect of the present invention is a composition comprising a DNA template comprising: (a) a sequence encoding a protein, (b) a tail region comprising deoxyadenosine nucleotides and one or more other nucleotides, and (c) a restriction enzyme binding site.

[0123] In embodiments, the one or more other nucleotides comprises deoxyguanosine residues.

[0124] In embodiments, the tail region comprises about 1%, about 2%, about 5%, about 10%, about 15%, about 20%, about 25%, about 30%, about 35%, about 40%, about 45%, or about 50% deoxyguanosine residues.

[0125] In embodiments, the tail region comprises more than 50% deoxyguanosine residues.

[0126] In embodiments, the one or more other nucleotides comprises deoxycytidine residues.

[0127] In embodiments, the tail region comprises about 1%, about 2%, about 5%, about 10%, about 15%, about 20%, about 25%, about 30%, about 35%, about 40%, about 45%, or about 50% deoxycytidine residues.

[0128] In embodiments, the tail region comprises more than 50% deoxycytidine residues.

[0129] In embodiments, the one or more other nucleotides comprises deoxythymidine residues.

[0130] In embodiments, the tail region comprises about 1%, about 2%, about 5%, about 10%, about 15%, about 20%, about 25%, about 30%, about 35%, about 40%, about 45%, or about 50% deoxythymidine residues.

[0131] In embodiments, the tail region comprises more than 50% deoxythymidine residues.

[0132] In embodiments, the one or more other nucleotides comprise deoxyguanosine residues and deoxycytidine residues.

[0133] In any of the preceding embodiments and aspects, the tail region comprises about 99%, about 98%, about 95%, about 90%, about 85%, about 80%, about 75%, about 70%, about 65%, about 60%, about 55%, or about 50% deoxyadenosine residues.

[0134] In any of the preceding embodiments and aspects, the tail region comprises fewer than 50% deoxyadenosine residues.

[0135] In any of the preceding embodiments and aspects, the length of the tail region is between about 80 base pairs and about 120 base pairs, about 120 base pairs and about 160 base pairs, about 160 base pairs and about 200 base pairs, about 200 base pairs and about 240 base pairs, about 240 base pairs and about 280 base pairs, or about 280 base pairs and about 320 base pairs.

[0136] In any of the preceding embodiments and aspects, the length of the tail region is greater than 320 base pairs.

[0137] An aspect of the present invention is a composition comprising a synthetic RNA comprising: (a) a sequence encoding a protein, and (b) a tail region comprising adenosine nucleotides and one or more other nucleotides.

[0138] In embodiments, the one or more other nucleotides comprises guanosine residues.

[0139] In embodiments, the tail region comprises about 1%, about 2%, about 5%, about 10%, about 15%, about 20%, about 25%, about 30%, about 35%, about 40%, about 45%, or about 50% guanosine residues.

[0140] In embodiments, the tail region comprises more than 50% guanosine residues.

[0141] In embodiments, the one or more other nucleotides comprises cytidine residues.

[0142] In embodiments, the tail region comprises about 1%, about 2%, about 5%, about 10%, about 15%, about 20%, about 25%, about 30%, about 35%, about 40%, about 45%, or about 50% cytidine residues.

[0143] In embodiments, the tail region comprises more than 50% cytidine residues.

[0144] In embodiments, the one or more other nucleotides comprises uridine residues.

[0145] In embodiments, the tail region comprises about 1%, about 2%, about 5%, about 10%, about 15%, about 20%, about 25%, about 30%, about 35%, about 40%, about 45%, or about 50% uridine residues.

[0146] In embodiments, the tail region comprises more than 50% uridine residues.

[0147] In embodiments, the one or more other nucleotides comprise guanosine residues and cytidine residues.

[0148] In any of the preceding embodiments and aspects, the tail region comprises about 99%, about 98%, about 95%, about 90%, about 85%, about 80%, about 75%, about 70%, about 65%, about 60%, about 55%, or about 50% adenosine residues.

[0149] In any of the preceding embodiments and aspects, the tail region comprises fewer than 50% adenosine residues.

[0150] In any of the preceding embodiments and aspects, the length of the tail region is between about 80 nucleotides and about 120 nucleotides, about 120 nucleotides and about 160 nucleotides, about 160 nucleotides and about 200 nucleotides, about 200 nucleotides and about 240 nucleotides, about 240 nucleotides and about 280 nucleotides, or about 280 nucleotides and about 320 nucleotides.

[0151] In any of the preceding embodiments and aspects, the length of the tail region is greater than 320 nucleotides.

[0152] An aspect of the present invention is a composition comprising a synthetic RNA comprising a 3′-untranslated region sequence having at least 90% homology to the 3′-untranslated region of a gene selected from: APOBEC3H, CD52, DMC1, EIF3E, GPR160, and RPS24.

[0153] In any of the preceding embodiments and aspects, the synthetic RNA further comprises one or more non-canonical nucleotides.

[0154] In embodiments, the non-canonical nucleotides have one or more substitutions at positions selected from the 2C, 4C, and 5C positions for a pyrimidine, or selected from the 6C, 7N and 8C positions for a purine.

[0155] In any of the preceding embodiments and aspects, the non-canonical nucleotides comprise one or more of 5-hydroxycytidine, 5-methylcytidine, 5-hydroxymethylcytidine, 5-carboxycytidine, 5-formylcytidine, 5-methoxycytidine, pseudouridine, 5-hydroxyuridine, 5-methyluridine, 5-hydroxymethyluridine, 5-carboxyuridine, 5-formyluridine, 5-methoxyuridine, 5-hydroxypseudouridine, 5-methylpseudouridine, 5-hydroxymethylpseudouridine, 5-carboxypseudouridine, 5-formylpseudouridine, and 5-methoxypseudouridine, optionally at an amount of at least 50%, or at least 60%, or at least 70%, or at least 80%, or at least 90%, or 100% of the non-canonical nucleotides.

[0156] In any of the preceding embodiments and aspects, at least about 50% of cytidine residues are non-canonical nucleotides, and which are selected from 5-hydroxycytidine, 5-methylcytidine, 5-hydroxymethylcytidine, 5-carboxycytidine, 5-formylcytidine, and 5-methoxycytidine.

[0157] In any of the preceding embodiments and aspects, at least about 75% or at least about 90% of cytidine residues are non-canonical nucleotides, and the non-canonical nucleotides are selected from 5-hydroxycytidine, 5-methylcytidine, 5-hydroxymethylcytidine, 5-carboxycytidine, 5-formylcytidine, and 5-methoxycytidine.

[0158] In any of the preceding embodiments and aspects, at least about 20% of uridine, or at least about 40%, or at least about 50%, or at least about 75%, or at about least 90% of uridine residues are non-canonical nucleotides, and the non-canonical are selected from pseudouridine, 5-hydroxyuridine, 5-methyluridine, 5-hydroxymethyluridine, 5-carboxyuridine, 5-formyluridine, 5-methoxyuridine, 5-hydroxypseudouridine, 5-methylpseudouridine, 5-hydroxymethylpseudouridine, 5-carboxypseudouridine, 5-formylpseudouridine, and 5-methoxypseudouridine.

[0159] In any of the preceding embodiments and aspects, at least about 40%, or at least about 50%, or at least about 75%, or at about least 90% of uridine residues are non-canonical nucleotides, and the non-canonical nucleotides are selected from pseudouridine, 5-hydroxyuridine, 5-methyluridine, 5-hydroxymethyluridine, 5-carboxyuridine, 5-formyluridine, 5-methoxyuridine, 5-hydroxypseudouridine, 5-methylpseudouridine, 5-hydroxymethylpseudouridine, 5-carboxypseudouridine, 5-formylpseudouridine, and 5-methoxypseudouridine.

[0160] In any of the preceding embodiments and aspects, at least about 10% of guanine residues are non-canonical nucleotides, and the non-canonical nucleotide is optionally 7-deazaguanosine.

[0161] In any of the preceding embodiments and aspects, the synthetic RNA comprises no more than about 50% 7-deazaguanosine in place of guanosine residues.

[0162] In any of the preceding embodiments and aspects, the synthetic RNA does not comprise non-canonical nucleotides in place of adenosine residues.

[0163] In any of the preceding embodiments and aspects, the synthetic RNA comprises 5-methoxyuridine.

[0164] The details of the invention are set forth in the accompanying description below. Although methods and materials similar or equivalent to those described herein can be used in the practice or testing of the present invention, illustrative methods and materials are now described. Other features, objects, and advantages of the invention will be apparent from the description and from the claims. In the specification and the appended claims, the singular forms also include the plural unless the context clearly dictates otherwise. Unless defined otherwise, all technical and scientific terms used herein have the same meaning as commonly understood by one of ordinary skill in the art to which this invention belongs.

[0165] Any aspect or embodiment disclosed herein can be combined with any other aspect or embodiment as disclosed herein.

### BRIEF DESCRIPTION OF THE DRAWINGS

[0166] FIG. 1 depicts intradermal injection of a solution comprising RNA encoding GFP into the ventral forearm of a healthy, 33 year-old, 70 kg, male human subject.

[0167] FIG. 2 depicts a region of the ventral forearm of the subject shown in FIG. 1 after treatment with RNA comprising 5-methoxyuridine and encoding GFP (injection sites 1-3) or COL7 (injection site 4). The image was taken immediately following the final injection.

[0168] FIG. 3 depicts the region of FIG. 2, 24 hours after injection.

[0169] FIG. 4 depicts the results of fluorescent imaging of the region of FIG. 2, using the indicated fluorescent channels. The dose at each injection site is also indicated. Images were taken 24 hours after injection.

[0170] FIG. 5 depicts the results of fluorescent imaging of the region of FIG. 2, using the FITC fluorescent channel. The dose at each injection site is indicated. Images were taken 48 hours after injection.

[0171] FIG. 6 depicts the results of quantitative fluorescent imaging of the region of FIG. 2, using the FITC fluorescent channel. The horizontal axis indicates time after injection.

[0172] FIG. 7A depicts the results of fluorescent imaging of an independent experiment in which a region of the ventral forearm of as the subject shown in FIG. 2 treated with RNA comprising 5-methoxyuridine and encoding GFP. The image was taken 24 hours after injection.

[0173] FIG. 7B depicts intradermal injection of RNA encoding GFP, formulated for intradermal injection, into the ventral forearm of the subject in FIG. 1, 48 months following the injection of FIG. 1. The arrow indicates an approximately 1 cm² area of GFP expression at the site of injection.

[0174] FIG. 8 depicts primary human neonatal fibroblasts reprogrammed by five transfections with RNA encoding reprogramming proteins. Cells were fixed and stained for Oct4 protein. Nuclei were counterstained with Hoechst 33342.

[0175] FIG. 9 depicts primary adult human dermal fibroblasts transfected with RNA encoding green fluorescent protein (“GFP”), prepared and stored as indicated.

[0176] FIG. 10 depicts the results of an experiment in which 100,000 primary human neonatal epidermal keratinocytes (animal-protein free) were transfected with 2 μg RNA encoding the indicated gene-editing proteins (1 μg L and 1 μg R). DNA was harvested after 48 h and analyzed for gene editing (A/B indicates RIBOSLICE_A L, RIBOSLICE_B R; RIBOSLICE A indicates repeat sequences comprising the sequence: GHGG, HG, GHGG, HG, etc.; RIBOSLICE B indicates repeat sequences comprising the sequence: HG, GHGG, HG, GHGG, etc.; L targets the sequence: TGCCTGGTCCCTGTCTCCCT (SEQ ID NO: 615); R targets the sequence: TGTCTTCTGGGCAGCATCTC (SEQ ID NO: 616); a target sequence is approximately 75 bp from A1AT [SERPINA1] start codon). “TAL” indicates a control TALEN directed to the target sequence.

[0177] FIG. 11 depicts the results of an experiment in which 100,000 primary human neonatal epidermal keratinocytes (animal-protein free) were transfected with 2 μg RNA encoding the indicated gene-editing proteins (1 μg L and 1 μg R). DNA was harvested after 48 h and analyzed for gene editing (A/B indicates RIBOSLICE_A L, RIBOSLICE_B R; RIBOSLICE A indicates repeat sequences comprising the sequence: GHGG, HG, GHGG, HG, etc.; RIBOSLICE B indicates repeat sequences comprising the sequence: HG, GHGG, HG, GHGG, etc.; L targets the sequence: TATTCCCGGGCTCCCAGGCA (SEQ ID NO: 622); R targets the sequence: TCTCCTGGCCTTCCTGCCTC (SEQ ID NO: 612); a target sequence is near the end of exon 73 of COL7A1). “TAL” indicates a control TALEN directed to the target sequence.

[0178] FIG. 12 depicts the results of an experiment in which 50,000 primary human neonatal epidermal keratinocytes (HEKn) (animal-protein free) were transfected with 2 μg RNA encoding the indicated gene-editing proteins. DNA was harvested after 48 h and analyzed for gene editing (“Neg” indicates untreated HEKn DNA; “WT” indicates wild type FokI; “EA” indicates enhanced activity FokI (S35P and K58E); “Het” indicates heterodimer (L: Q103E, N113D, I116L, R: E107K, H154R, 1155K); “EA/Het” indicates both EA and Het; L targets the sequence: TATTCCCGGGCTCCCAGGCA (SEQ ID NO: 622); R targets the sequence: TCTCCTGGCCTTCCTGCCTC (SEQ ID NO: 612); a target sequence is near the end of exon 73 of COL7A1).

[0179] FIG. 13 depicts the results of an experiment in which 100,000 primary human neonatal epidermal keratinocytes (animal-protein free) were transfected with 2 μg RNA encoding the HBB exon 1 TALEN L and HBB exon 1 TALEN R gene-editing proteins (1 μg each). DNA was harvested after 48 h and analyzed for gene editing (T7E1 assay; forward primer: GCCAAGGACAGGTACGGCTGTCATC (SEQ ID NO: 627); reverse primer: CTTGCCATGAGCCTTCACCTTAGGGTTG (SEQ ID NO: 628); product size: 518 nt; predicted band sizes: 300 nt, 218 nt).

[0180] FIG. 14 depicts the results of an experiment in which 100,000 primary human neonatal epidermal keratinocytes (animal-protein free) were transfected with 2 μg RNA encoding the PD1 exon 1 TALEN L and PD1 exon 1 TALEN R gene-editing proteins (1 μg each). DNA was harvested after 48 h and analyzed for gene editing (T7E1 assay; forward primer: TCCTCTGTCTCCCTGTCTCTGTCTCTCTCTC (SEQ ID NO: 594); reverse primer: GGACTTGGGCCAGGGGAGGAG (SEQ ID NO: 595); product size: 612 nt; predicted band sizes: 349 nt, 263 nt).

[0181] FIG. 15 depicts the encapsulation efficiency of liposomes comprising PEGylated lipids and encapsulating RNA encoding NOVEPOIETIN or GFP.

[0182] FIG. 16 depicts the results of an assay in which liposomes comprising 2 μg of RNA were applied dropwise to 50,000 primary human neonatal epidermal keratinocytes (animal-protein free) in one well of a 6-well plate. After 48 hours, gene editing efficiency was assayed using a mutation-specific nuclease (T7E1).

[0183] FIG. 17 depicts a SURVEYOR assay using the DNA of primary adult human dermal fibroblasts transfected with RNA TALENs targeting the sequence TGAGCAGAAGTGGCTCAGTG (SEQ ID NO: 467) and TGGCTGTACAGCTACACCCC (SEQ ID NO: 468), located within the COL7A1 gene. The bands present in the +RNA lane indicate editing of a region of the gene that is frequently involved in dystrophic epidermolysis bullosa.

[0184] FIG. 18 depicts a SURVEYOR assay using the DNA of primary adult human dermal fibroblasts transfected with RNA TALENs targeting the sequence TTCCACTCCTGCAGGGCCCC (SEQ ID NO: 469) and TCGCCCTTCAGCCCGCGTTC (SEQ ID NO:470), located within the COL7A1 gene. The bands present in the +RNA lane indicate editing of a region of the gene that is frequently involved in dystrophic epidermolysis bullosa.

[0185] FIG. 19 shows the immunogenicity of various synthetic RNA constructs in the context of a gene-editing (i.e. unmodified nucleotides “A,G,U,C”; pseudouridine only “psU”; 5-methylcytidine only “5 mC”; both pseudouridine and 5-methylcytidine “psU+5 mC”; and a negative control “neg”).

[0186] FIG. 20 shows the gene-editing activity in cells transfected with various synthetic RNA constructs (i.e. unmodified nucleotides “A,G,U,C”; psuedouridine only “psU”; 5-methylcytidine only “5 mC”; both psuedouridine and 5-methylcytidine “psU+5 mC”; and a negative control “neg”).

[0187] FIG. 21 depicts gene editing of the COL7A1 gene in primary human epidermal keratinocytes transfected with RNA encoding TALENs and a single-stranded DNA repair template (“RT”) of the indicated length. The presence of bands at the locations shown by asterisks (“*”) indicates successful gene editing.

[0188] FIG. 22 depicts gene editing (“T7E1”) and correction (“Digestion”) of the COL7A1 gene in primary human epidermal keratinocytes transfected with RNA encoding TALENs and an 80 nt single-stranded DNA repair template (“RT”). The presence of bands at the locations shown by asterisks (“*”) indicates successful gene editing (“T7E1”) and correction (“Digestion”).

[0189] FIG. 23 depicts gene correction of the COL7A1 gene in primary human epidermal keratinocytes transfected with RNA encoding TALENs and a single-stranded DNA repair template (“RT”) of the indicated length. The presence of bands at the locations shown by asterisks (“*”) indicates successful gene correction.

[0190] FIG. 24 depicts gene editing of the COL7A1 gene in primary human epidermal keratinocytes transfected with RNA encoding TALENs and an 80 nt single-stranded DNA repair template (“RT”) at the indicated ratios of RNA to repair template. The presence of bands at the locations shown by asterisks (“*”) indicates successful gene editing.

[0191] FIG. 25 depicts gene correction of the COL7A1 gene in primary human epidermal keratinocytes transfected with RNA encoding TALENs and an 80 nt single-stranded DNA repair template (“RT”) at the indicated ratios of RNA to repair template. The presence of bands at the locations shown by asterisks (“*”) indicates successful gene correction.

[0192] FIG. 26 depicts the serum levels of FGF21, IL15, IL6, IL22, and Novepoietin following a single intradermal injection of various RNAs encoding these proteins as described in Example 45. Three rats were analyzed for each RNA tested.

[0193] FIG. 27 depicts the results of an experiment in which 50,000 primary human neonatal epidermal keratinocytes (animal-protein free) were transfected with 2 μg RNA encoding the COL7A1 exon 73 spliceMod TALEN L1-4 and COL7A1 exon 73 spliceMod TALEN R1-3 gene-editing proteins (1 μg each). Specific combinations transfected were L1/R1, L2/R1, L2/R2, L3/R3, and L4/R3. DNA was harvested after 48 h and analyzed for gene editing (T7E1 assay; forward primer: GCATCTGCCCTGCGGGAGATC (SEQ ID NO: 478); reverse primer: CCACGTTCTCCTTTCTCTCCCCGTTC (SEQ ID NO: 479); product size: 535 nt; predicted band sizes: 203 nt, 332 nt for L1/R1; 202 nt, 333 nt for L1/R2; 201 nt, 334 nt for L2/R2; 189 nt, 346 nt for L3/R3; and 186 nt, 349 nt for L4/R3).

[0194] FIG. 28 depicts the results of an experiment in which 50,000 primary human neonatal epidermal keratinocytes (animal-protein free) were transfected with 2 μg RNA encoding the COL7A1 exon 73 spliceMod TALEN L2, RIBOSLICE L2A, or RIBOSLICE L2B and COL7A1 exon 73 spliceMod TALEN R2, RIBOSLICE R2A or RIBOSLICE R2B gene-editing proteins (1 μg each). Specific combinations transfected were L2A/R2A, L2B/R2B, and L2/R2. DNA was harvested after 48 h and analyzed for gene editing (T7E1 assay; forward primer: GCATCTGCCCTGCGGGAGATC (SEQ ID NO: 478); reverse primer: CCACGTTCTCCTTTCTCTCCCCGTTC (SEQ ID NO: 479); product size: 535 nt; predicted band sizes: 201 nt, 334 nt).

[0195] FIG. 29 depicts the results of an experiment in which 50,000 primary human neonatal epidermal keratinocytes (animal-protein free) were transfected with 2 μg RNA encoding the COL7A1 exon 73 spliceMod TALEN L1-4 and COL7A1 exon 73 spliceMod TALEN R1-3 gene-editing proteins (1 μg each). Specific combinations transfected were L1/R1, L1/R2, L2/R2, L3/R3, and L4/R3. RNA was harvested after 48 h and analyzed for presence of exon 73 in the spliced mRNA (RT-PCR; reverse transcription primer: GCTCTCCTGGTAGACCCGGGTTG (SEQ ID NO: 658), amplification forward primer: GGTTGCTGGAAACTGCTGGCATCAAGGCATCTG (SEQ ID NO: 659) amplification reverse primer: CACCCTTGAGTCCAGGGGGTCCCTGTTCTC (SEQ ID NO: 661); full product size: 513 nt; product size without exon 73: 312 nt).

[0196] FIG. 30A depicts the results of an experiment in which 50,000 primary human neonatal epidermal keratinocytes (animal-protein free) were transfected with 2 μg RNA encoding the COL7A1 exon 73 spliceMod TALEN L1-4 and COL7A1 exon 73 spliceMod TALEN R1-3 gene-editing proteins (1 μg each). Specific combinations transfected were L1/R1, L2/R1, L2/R2, L3/R3, and L4/R3. RNA was harvested after 48 h and analyzed for presence of exon 73 in the spliced mRNA (RT-PCR; reverse transcription primer: GCTCTCCTGGTAGACCCGGGTTG (SEQ ID NO: 658), amplification forward primer: GCATCTGCCCTGCGGGAGATC (SEQ ID NO: 478) amplification reverse primer: CCACGTTCTCCTTTCTCTCCCCGTTC (SEQ ID NO: 479); full product size: 353 nt; product size without exon 73: 152 nt).

[0197] FIG. 30B depicts the results of an experiment in which 50,000 primary human neonatal epidermal keratinocytes (animal-protein free) were transfected with 2 μg RNA encoding the COL7A1 exon 73 splice acceptor-targeting pairs (target sequences: TGTACAGCCACCAGCATTCT (SEQ ID NO: 652) and TCCAGGAAAGCCGATGGGGC (SEQ ID NO: 656)) (1 μg each individual pair component) with mutations in the N-terminus of the protein. 1: 156L, 2: K57R, 3: R61K, 4: A65G, 5: A70G, 6: K57E, 7. K57E and V60A. DNA was harvested after 48 h and analyzed for gene editing (T7E1 assay; forward primer: GCATCTGCCCTGCGGGAGATC (SEQ ID NO: 478), reverse primer: CCACGTTCTCCTTTCTCTCCCCGTTC (SEQ ID NO: 479), product size: 535 nt, predicted band sizes: 202 nt, 333 nt).

[0198] FIG. 31 depicts the results of an experiment in which 4 wells, each containing 50,000 primary human neonatal epidermal keratinocytes (animal-protein free) were each transfected with 2 μg RNA encoding the COL7A1 exon 73 spliceMod TALEN L2 and COL7A1 exon 73 spliceMod TALEN R2 gene-editing proteins (1 μg each). RNA was harvested after 1, 3, 5 and 18 days following transfection and analyzed for presence of exon 73 in the spliced mRNA (RT-PCR; reverse transcription primer: GCTCTCCTGGTAGACCCGGGTTG (SEQ ID NO: 658), amplification forward primer: GGTTGCTGGAAACTGCTGGCATCAAGGCATCTG (SEQ ID NO: 659) amplification reverse primer: CACCCTTGAGTCCAGGGGGTCCCTGTTCTC (SEQ ID NO: 661); full product size: 513 nt; product size without exon 73: 312 nt).

[0199] FIG. 32 depicts BMP7 protein levels in rats treated with RNAs encoding BMP7 variants as described in Example 42. Error bars indicate SEM (n=6).

[0200] FIG. 33 depicts the results of an experiment in which cortical tissue from embryonic day 18 Sprague Dawley rat embryos was transfected with 0.1 μg RNA encoding mRFP. The tissue was examined approximately 16 h after transfection by brightfield and fluorescent microscopy.

[0201] FIG. 34 depicts the results of an experiment in which 50,000-100,000 cortical neurons from embryonic day 18 Sprague Dawley rat embryos were cultured on a poly-D-lysine coated 24-well for 6 days and then transfected with 0.05 μg RNA encoding mRFP or 1-5×10¹⁰ viral genomes of AAV2-mRFP. The cells were imaged every hour for the first 18 h and then every 6 h by brightfield and fluorescent microscopy. Error bars show standard deviation.

[0202] FIG. 35 depicts the results of an experiment in which 100,000 cortical neurons from embryonic day 18 Sprague Dawley rat embryos were cultured on a poly-D-lysine coated 24-well for 6 days and then transfected with 0.05 μg RNA encoding mRFP. Images show RFP fluorescence. The number at the top left corner of each panel indicates the time after transfection in hours.

[0203] FIG. 36 depicts the results of an experiment in which 50,000 primary human neonatal epidermal keratinocytes (animal-protein free) were transfected with 2 μg RNA encoding the HTT TALEN pairs 1/1 (target sequences: TTTGACAAATGAGTGTTTCT (SEQ ID NO: 730) and TCTCCACTGATCTCATCCTT (SEQ ID NO: 731)) and 2/2 (target sequences: TCGCCATTTGACAAATGAGT and TGATCTCATCCTTCACTGAG) (1 μg each individual pair component). DNA was harvested after 10 d and analyzed for gene editing (T7E1 assay; forward primer: AGTGACCACTGCCAACAGCTTCATGTC (SEQ ID NO: 734); reverse primer: GGGTAACAGCTGAATCAGGCCCTTCG (SEQ ID NO: 735); product size: 920 bp; predicted band sizes: 322 bp, 598 bp for pair 1/1; 328 bp, 592 bp for pair 2/2).

[0204] FIG. 37 depicts a tissue section of a liver treated in vivo with RNA encoding GFP and stained for the presence of GFP (shown at 40× magnification).

[0205] FIG. 38 depicts a tissue section of a spinal cord treated in vivo with RNA encoding GFP and stained for the presence of GFP (shown at 40× magnification).

[0206] FIG. 39 depicts a tissue section of a lateral ventricle treated in vivo with a control buffer and stained for the presence of GFP (shown at 10× magnification).

[0207] FIG. 40 depicts a tissue section of a lateral ventricle treated in vivo with RNA encoding GFP and stained for the presence of GFP (shown at 4× magnification).

[0208] FIG. 41 depicts a tissue section of a lateral ventricle treated in vivo with RNA encoding GFP and stained for the presence of GFP (shown at 10× magnification).

[0209] FIG. 42 depicts a tissue section of a lateral ventricle treated in vivo with RNA encoding GFP and stained for the presence of GFP (shown at 4× magnification).

[0210] FIG. 43 depicts a tissue section of a lateral ventricle treated in vivo with RNA encoding GFP and stained for the presence of GFP (shown at 10× magnification).

[0211] FIG. 44 depicts a tissue section of a lateral ventricle treated in vivo with a control buffer and stained for the presence of GFP (shown at 10× magnification).

[0212] FIG. 45 depicts a tissue section of a lateral ventricle treated in vivo with RNA encoding GFP and stained for the presence of GFP (shown at 4× magnification).

[0213] FIG. 46 depicts a tissue section of a lateral ventricle treated in vivo with RNA encoding GFP and stained for the presence of GFP (shown at 10× magnification).

[0214] FIG. 47 depicts a tissue section of a lateral ventricle treated in vivo with RNA encoding GFP and stained for the presence of GFP (shown at 40× magnification).

[0215] FIG. 48 depicts a tissue section of a hippocampus treated in vivo with a control buffer and stained for the presence of GFP (shown at 10× magnification).

[0216] FIG. 49 depicts a tissue section of a hippocampus treated in vivo with RNA encoding GFP and stained for the presence of GFP (shown at 10× magnification).

[0217] FIG. 50 depicts a tissue section of a hippocampus treated in vivo with RNA encoding GFP and stained for the presence of GFP (shown at 40× magnification).

[0218] FIG. 51 depicts a tissue section of a rat ventricle treated in vivo with RNA encoding GFP (formulated as an LNP) and stained for the presence of GFP (shown at 40× magnification).

[0219] FIG. 52 depicts a tissue section of a rat ventricle treated in vivo with RNA encoding GFP (formulated as an LNP) and stained for the presence of GFP (shown at 40× magnification).

[0220] FIG. 53 depicts a tissue section of a rat ventricle treated in vivo with RNA encoding GFP (formulated as an LNP) and stained for the presence of GFP (shown at 40× magnification).

[0221] FIG. 54 depicts a tissue section of a rat ventricle treated in vivo with RNA encoding GFP (formulated as an LNP) and stained for the presence of GFP (shown at 40× magnification).

[0222] FIG. 55 depicts a tissue section of a rat ventricle treated in vivo with RNA encoding GFP (formulated as an LNP) and stained for the presence of GFP (shown at 40× magnification).

[0223] FIG. 56 depicts a tissue section of a rat ventricle treated in vivo with RNA encoding GFP (formulated as an LNP) and stained for the presence of GFP (shown at 40× magnification).

[0224] FIG. 57 depicts the results of an experiment in which 20,000 human neuroblastoma cells (SH-SY5Y) were transfected with 0.5 μg RNA encoding the below-indicated gene-editing proteins (0.25 μg L and 0.25 μg R). DNA was harvested after 48 h and analyzed for gene editing. “Neg” indicates untreated SH-SY5Y DNA, “1” indicates a TALEN pair targeting sequence TCCATCCAGGCCTCTTATGT (SEQ ID NO: 663) and TCTTTTCATCCTGTATATTT (SEQ ID NO: 664), “2” indicates a TALEN pair targeting sequence TGAAAAGATGGCAATGTTGC (SEQ ID NO: 665) and TGTGAAATGGACAAAGCTCT (SEQ ID NO: 666), “3” indicates a TALEN pair targeting sequence TCCCCCAGGACCTCAGAGCT (SEQ ID NO: 667) and TTCAATGAGGGCAAGAGACT (SEQ ID NO: 668). The T7E1 assay yields an expected product size of 725 nt (forward primer: gatggaatcttctcctggtc, SEQ ID NO: 669; reverse primer: aggaatgtccccatagatga, SEQ ID NO: 670). Predicted band sizes are: for pair 1: 495 nt and 230 nt, for pair 2: 544 nt and 181 nt, and for pair 3: 567 nt and 158 nt.

[0225] FIG. 58 depicts the results of staining RNA-reprogrammed human pluripotent stem cells (PSC), cells differentiated therefrom into mesenchymal stem cells (at both early passage and late passage), and STEMPRO™ BM Mesenchymal Stem Cells (Thermo Fisher). Cells were stained for pluripotent stem cell markers (Nanog and Sox2) and mesenchymal stem cell markers (CD73 and CD105).

[0226] FIG. 59 depicts the results of an experiment in which the telomere length of cells that were reprogrammed using RNA and differentiated into mesenchymal stem cells was measured.

[0227] FIG. 60 depicts the proliferative capacity of mesenchymal stem cells differentiated from RNA-reprogrammed human pluripotent stem cells (PSC-MSC) or STEMPRO™ BM Mesenchymal Stem Cells (BM-MSC; Thermo Fisher). Cells were cultured in 6-well plates in MESENCULT™ Proliferation medium (STEMCELL Technologies). Cells were counted and passaged when at or near confluence until senescence. Population doublings were calculated from total cell number.

[0228] FIG. 61 depicts the result of an experiment in which human neonatal epidermal keratinocytes were transfected with RNA encoding GFP and comprising the indicated tail.

[0229] FIG. 62 depicts the results of an experiment in which human neonatal epidermal keratinocytes were transfected with RNA encoding NOVEPOIETIN and comprising the indicated tail. The concentration of NOVEPOIETIN in the culture medium was measured by ELISA.

[0230] FIG. 63 depicts gene editing of the HBB gene in primary human cord blood CD34⁺ vcells transfected with RNA encoding TALENs and with the oligonucleotide repair template (“+RNA”). A sample of cells that was not transfected with RNA or repair template is identified as the negative control, “Neg.”. The presence of bands following digestion with T7E1, analyzed by agarose gel electrophoresis, at the locations shown by asterisks (“*”) indicates successful gene editing.

[0231] FIG. 64 depicts gene repair of the HBB gene in primary human cord blood CD34⁺ cells transfected with RNA encoding TALENs and with the oligonucleotide repair template (“+RNA”). A sample of cells that was not transfected with RNA or repair template is identified as the negative control, “Neg.”. The presence of bands following digestion with Hind III-HF, analyzed by agarose gel electrophoresis, at the locations shown by asterisks (“*”), indicates successful gene repair.

[0232] FIG. 65 depicts the results of an experiment in which 50,000 primary human neonatal epidermal keratinocytes (animal-protein free) were transfected with 2 μg RNA encoding PD1 TALENs.

[0233] FIG. 66 depicts the results of an experiment in which 50,000 primary human neonatal epidermal keratinocytes (animal-protein free) were transfected with 2 μg RNA encoding ADORA2A TALENs.

[0234] FIG. 67 depicts the results of an experiment in which 50,000 RNA-reprogrammed human pluripotent stem cells were transfected with 2 μg RNA encoding PD1 TALENs.

### DETAILED DESCRIPTION OF THE INVENTION

[0235] The present invention is based, in part, on the discovery of a safe and effective dosing strategy for nucleic acid drugs, including RNA, such as RNA comprising non-canonical (or “modified”) nucleotides, in humans. The inventors believe this to be the first report of safe and effective dosing of RNA molecules, including those comprising non-canonical nucleotides, in humans. Despite reports in the art that very large doses of RNA molecules are needed for mammalian dosing, and minimal therapeutic effect is achieved despite high dosing (see, e.g. US Patent Publication No. 2013/0245103), the present inventors have surprisingly managed to dose synthetic RNA in a human and achieve significant target protein expression with minimal immunological or other side effects.

[0236] Synthetic mRNA Formulations

[0237] In various embodiments, the present invention provides improved doses, formulations, administration, and methods of use of nucleic acid drugs, which include RNA, which may contain non-canonical nucleotides (e.g. a residue other than adenine, guanine, thymine, uracil, and cytosine or the standard nucleoside, nucleotide, deoxynucleoside or deoxynucleotide derivatives thereof). In various embodiments, the RNA comprising non-canonical nucleotides leads to the expression of a protein encoded by the RNA, the protein often being one of therapeutic benefit (sometimes called the “target” or “protein of interest”). Further, this expression of therapeutic protein is achieved with minimal or negligible toxicity.

[0238] In various aspects, the present invention is based on the surprising discovery of safe and effective doses and administration parameters of nucleic acid drugs for human subjects. Nucleic acid drugs include a dsDNA molecule, a ssDNA molecule, a RNA molecule, a dsRNA molecule, a ssRNA molecule, a plasmid, an oligonucleotide, a synthetic RNA molecule, a miRNA molecule, an mRNA molecule, and an siRNA molecule. In various embodiments, the RNA comprises non-canonical nucleotides.

[0239] In some aspects, there is provided a method for delivering a nucleic acid drug, comprising administering an effective dose of a nucleic acid drug to a human subject in need thereof, wherein the nucleic acid drug comprises a synthetic RNA. In various embodiments, the effective dose is an amount sufficient to substantially increase an amount of a protein encoded by the nucleic acid drug in the human subject. For example, when the nucleic acid drug is a synthetic RNA comprising one or more modified nucleotides, the nucleic acid drug may result in higher protein expression than levels obtainable with a nucleic acid drug that does not comprise one or more modified nucleotides (e.g., RNA comprising the canonical nucleotides A, G, U, and C). In some embodiments, the nucleic acid drug results in about a 2-fold, or about a 3-fold, or about a 4-fold, or about a 5-fold, or about a 10-fold, or about a 15-fold, or about a 20-fold, or about a 25-fold, or about a 30-fold, or about a 35-fold, or about a 40-fold, or about a 45-fold, or about a 50-fold, or about a 100-fold increase in protein expression as compared to levels obtainable with a nucleic acid drug that does not comprise one or more modified nucleotides.

[0240] In some embodiments, the nucleic acid drug provides a sustained therapeutic effect that is optionally mediated by a sustained expression of target protein. For instance, in some embodiments, the therapeutic effect is present for over about 1 day, or over about 2 days, or over about 3 days, or over about 4 days, or over about 5 days, or over about 6 days, or over about 7 days, or over about 8 days, or over about 9 days, or over about 10 days, or over about 14 days after administration. In some embodiments, this sustained effect obviates the need for, or reduces the amount of, maintenance doses.

[0241] In some embodiments, the nucleic acid drug provides a sustained target protein level. For instance, in some embodiments, the target protein is present (e.g. in measurable amounts, e.g. in the serum of a patient to whom the nucleic acid drug has been administered) for over about 1 day, or over about 2 days, or over about 3 days, or over about 4 days, or over about 5 days, or over about 6 days, or over about 7 days, or over about 8 days, or over about 9 days, or over about 10 days, or over about 14 days after administration. In some embodiments, this sustained effect obviates the need for, or reduces the amount of, maintenance doses.

[0242] In various embodiments, the nucleic acid drug provides therapeutic action without sustained presence of the nucleic acid drug itself. In some embodiments, the nucleic acid drug is rapidly metabolized, for instance, within about 6 hours, or about 12 hours, or about 18 hours, or about 24 hours, or about 2 days, or about 3 days, or about 4 days, or about 5 days, or about 1 week from administration.

[0243] In various embodiments, the effective dose is an amount that substantially avoids cell toxicity in vivo. In various embodiments, the effective dose is an amount that substantially avoids an immune reaction in a human subject. For example, the immune reaction may be an immune response mediated by the innate immune system. Immune response can be monitored using markers known in the art (e.g. cytokines, interferons, TLRs). In some embodiments, the effective dose obviates the need for treatment of the human subject with immune suppressants agents (e.g. B18R) used to moderate the residual toxicity. Accordingly, in some embodiments, the present methods allow for dosing that provides increased protein expression and reduces toxicity.

[0244] In some embodiments, the immune response is reduced by about 10%, about 20%, about 30%, about 40%, about 50%, about 60%, about 70%, about 80%, about 90%, about 95%, about 99%, about 99.9%, or greater than about 99.9% as compared to the immune response induced by a corresponding unmodified nucleic acid. In some embodiments, upregulation of one or more immune response markers is reduced by about 10%, about 20%, about 30%, about 40%, about 50%, about 60%, about 70%, about 80%, about 90%, about 95%, about 99%, about 99.9%, or greater than about 99.9% as compared to the upregulation of the one or more immune response markers induced by a corresponding unmodified nucleic acid. In some embodiments, the immune response marker comprises an mRNA or protein product of an interferon gene, including an interferon alpha gene, IFNB1, TLR3, RARRES3, EIF2AK2, STAT1, STAT2, IFIT1, IFIT2, IFIT3, IFIT5, OAS1, OAS2, OAS3, OASL, ISG20 or a fragment, variant, analogue, or family-member thereof. In some embodiments, the immune response marker comprises an mRNA or protein product of an TNF gene, including an TNF alpha gene, TNFRSF1A; TNFRSF1B; LTBR; TNFRSF4; CD40; FAS; TNFRSF6B; CD27; TNFRSF8; TNFRSF9; TNFRSF10A; TNFRSF10B; TNFRSF10C; TNFRSF10D; TNFRSF11A; TNFRSF11B; TNFRSF12A; TNFRSF13B; TNFRSF13C; TNFRSF14; NGFR; TNFRSF17; TNFRSF18; TNFRSF19; TNFRSF21; TNFRSF25; and EDA2R or a fragment, variant, analogue, or family-member thereof. In some embodiments, the immune response marker comprises an mRNA or protein product of an interleukin gene, including an IL-6 gene, IL-1; IL-2; IL-3; IL-4; IL-5; IL-6; IL-7; IL-8 or CXCL8; IL-9; IL-10; IL-11; IL-12; IL-13; IL-14; IL-15; IL-16; IL-17; IL-18; IL-19; IL-20; IL-21; IL-22; IL-23; IL-24; IL-25; IL-26; IL-27; IL-28; IL-29; IL-30; IL-31; IL-32; IL-33; IL-35; IL-36 or a fragment, variant, analogue, or family-member thereof.

[0245] In some embodiments, cell death is about 10%, about 25%, about 50%, about 75%, about 85%, about 90%, about 95%, or over about 95% less than the cell death observed with a corresponding unmodified nucleic acid. Moreover, cell death may affect fewer than about 50%, about 40%, about 30%, about 20%, about 10%, about 5%, about 1%, about 0.1%, about 0.01% or fewer than about 0.01% of cells contacted with the modified nucleic acids.

[0246] In some embodiments, there is provided a method for expressing a protein of interest in a population of cells in a mammalian subject, comprising administering a non-viral transfection composition comprising an effective dose of a RNA encoding the protein of interest to said cells, the RNA containing one or more non-canonical nucleotides that avoid substantial cellular toxicity, where the transfection composition is administered in an amount that allows for expression of said protein in said cells for at least about five days (e.g. about 5, or about 6, or about 7, about 8, or about 9, or about 10, or about 14 days) without substantial cellular toxicity. In some embodiments, there is provided a method for expressing a protein of interest in a population of cells in a mammalian subject, comprising administering a non-viral transfection composition comprising an effective dose of a RNA encoding the protein of interest to said cells, the RNA containing one or more non-canonical nucleotides that avoid substantial cellular toxicity, where the transfection composition is administered in an amount that allows for expression of said protein in said cells for at least about six hours (e.g. about six hours, or about 12 hours, or about 1 day, or about 2 days, or about 3 days, or about 4 days, or about 5 days) without substantial cellular toxicity.

[0247] In some embodiments, the effective dose of the nucleic acid drug, including synthetic RNA, is about 100 ng to about 2000 ng, or about 200 ng to about 1900 ng, or about 300 ng to about 1800 ng, or about 400 ng to about 1700 ng, or about 500 ng to about 1600 ng, or about 600 ng to about 1500 ng, or about 700 ng to about 1400 ng, or about 800 ng to about 1300 ng, or about 900 ng to about 1200 ng, or about 1000 ng to about 1100 ng, or about 500 ng to about 2000 ng, or about 500 ng to about 1500 ng, or about 500 ng to about 1000 ng, or about 1000 ng to about 1500 ng, or about 1000 ng to about 2000 ng, or about 1500 ng to about 2000 ng, or about 100 ng to about 500 ng, or about 200 ng to about 400 ng, or about 10 ng to about 100 ng, or about 20 ng to about 90 ng, or about 30 ng to about 80 ng, or about 40 ng to about 70 ng, or about 50 ng to about 60 ng.

[0248] In some embodiments, the effective dose of the nucleic acid drug, including synthetic RNA, is no more than about 50 ng, or about 100 ng, or about 200 ng, or about 300 ng, or about 400 ng, or about 500 ng, or about 600 ng, or about 700 ng, or about 800 ng, or about 900 ng, or about 1000 ng, or about 1100 ng, or about 1200 ng, or about 1300 ng, or about 1400 ng, or about 1500 ng, or about 1600 ng, or about 1700 ng, or about 1800 ng, or about 1900 ng, or about 2000 ng, or about 3000 ng, or about 4000 ng, or about 5000 ng.

[0249] In some embodiments, the effective dose of the nucleic acid drug, including synthetic RNA, is about 50 ng, or about 100 ng, or about 200 ng, or about 300 ng, or about 400 ng, or about 500 ng, or about 600 ng, or about 700 ng, or about 800 ng, or about 900 ng, or about 1000 ng, or about 1100 ng, or about 1200 ng, or about 1300 ng, or about 1400 ng, or about 1500 ng, or about 1600 ng, or about 1700 ng, or about 1800 ng, or about 1900 ng, or about 2000 ng, or about 3000 ng, or about 4000 ng, or about 5000 ng.

[0250] In some embodiments, the effective dose of the nucleic acid drug, including synthetic RNA, is about 0.028 pmol, or about 0.05 pmol, or about 0.1 pmol, or about 0.2 pmol, or about 0.3 pmol, or about 0.4 pmol, or about 0.5 pmol, or about 0.6 pmol, or about 0.7 pmol, or about 0.8 pmol, or about 0.9 pmol, or about 1.0 pmol, or about 1.2 pmol, or about 1.4 pmol, or about 1.6 pmol, or about 1.8 pmol, or about 2.0 pmol, or about 2.2 pmol, or about 2.4 pmol, or about 2.6 pmol, or about 2.8 pmol, or about 3.0 pmol, or about 3.2 pmol, or about 3.4 pmol, or about 3.6 pmol, or about 3.8 pmol, or about 4.0 pmol, or about 4.2 pmol, or about 4.4 pmol, or about 4.6 pmol, or about 4.8 pmol, or about 5.0 pmol, or about 5.5 pmol, or about 5.7 pmol.

[0251] In some embodiments, the nucleic acid drug, including synthetic RNA, is administered at a concentration of about 0.1 nM, or about 0.25 nM, or about 0.5 nM, or about 0.75 nM, or about 1 nM, or about 2.5 nM, or about 5 nM, or about 7.5 nM, or about 10 nM, or about 20 nM, or about 30 nM, or about 40 nM, or about 50 nM, or about 60 nM, or about 70 nM, or about 80 nM, or about 90 nM, or about 100 nM, or about 110 nM, or about 120 nM, or about 150 nM, or about 175 nM, or about 200 nM.

[0252] In some embodiments, the effective dose of the nucleic acid drug is about 350 ng/cm², or about 500 ng/cm², or about 750 ng/cm², or about 1000 ng/cm², or about 2000 ng/cm², or about 3000 ng/cm², or about 4000 ng/cm², or about 5000 ng/cm², or about 6000 ng/cm², or about 7000 ng/cm². In other embodiments, the effective dose is less than about 350 ng/cm². In certain embodiments, the effective dose is about 35 ng/cm², or about 50 ng/cm², or about 75 ng/cm², or about 100 ng/cm², or about 150 ng/cm², or about 200 ng/cm², or about 250 ng/cm², or about 300 ng/cm², or about 350 ng/cm².

[0253] In some embodiments, the effective dose of the nucleic acid drug is about 35 ng/cm² to about 7000 ng/cm², or about 50 ng/cm² to about 5000 ng/cm², or about 100 ng/cm² to about 3000 ng/cm², or about 500 ng/cm² to about 2000 ng/cm², or about 750 ng/cm² to about 1500 ng/cm², or about 800 ng/cm² to about 1200 ng/cm², or about 900 ng/cm² to about 1100 ng/cm².

[0254] In some embodiments, the effective dose of the nucleic acid drug is about 1 picomole/cm², or about 2 picomoles/cm², or about 3 picomoles/cm², or about 4 picomoles/cm², or about 5 picomoles/cm², or about 6 picomoles/cm², or about 7 picomoles/cm², or about 8 picomoles/cm², or about 9 picomoles/cm², or about 10 picomoles/cm², or about 12 picomoles/cm², or about 14 picomoles/cm², or about 16 picomoles/cm², or about 18 picomoles/cm², or about 20 picomoles/cm². In other embodiments, the effective dose is less than about 1 picomole/cm². In certain embodiments, the effective dose is about 0.1 picomoles/cm², or about 0.2 picomoles/cm², or about 0.3 picomoles/cm², or about 0.4 picomoles/cm², or about 0.5 picomoles/cm², or about 0.6 picomoles/cm², or about 0.7 picomoles/cm², or about 0.8 picomoles/cm², or about 0.9 picomoles/cm², or about 1 picomole/cm².

[0255] In some embodiments, the effective dose of the nucleic acid drug is about 0.1 picomoles/cm² to about 20 picomoles/cm², or about 0.2 picomoles/cm² to about 15 picomoles/cm², or about 0.5 picomoles/cm² to about 10 picomoles/cm², or about 0.8 picomoles/cm² to about 8 picomoles/cm², or about 1 picomole/cm² to about 5 picomoles/cm², or about 2 picomoles/cm² to about 4 picomoles/cm².

[0256] In various embodiments, the nucleic acid drug, including synthetic RNA, is administered in a pharmaceutically acceptable formulation. In various embodiments, the nucleic acid drug, including synthetic RNA, is formulated for one or more of injection and topical administration. By way of example, the nucleic acid drug, including synthetic RNA, may be formulated for injection to a tissue of interest, e.g. a disease site (by way of non-limiting example, a tumor). In various embodiments, injection includes delivery via a patch. In some embodiments, the delivery is mediated by electrical stimulation. In various embodiments, the nucleic acid drug, including synthetic RNA, is formulated for administration to one or more of the epidermis (optionally selected from the stratum corneum, stratum lucidum, stratum granulosum, stratum spinosum, and stratum germinativum), basement membrane, dermis (optionally selected from the papillary region and the reticular region), subcutis, conjunctiva cornea, sclera, iris, lens, corneal limbus, optic nerve, choroid, ciliary body, anterior segment, anterior chamber, and retina. In various embodiments, the nucleic acid drug, including synthetic RNA, is formulated for one or more of subcutaneous injection, intradermal injection, subdermal injection, intramuscular injection, intraocular injection, intravitreal injection, intra-articular injection, intracardiac injection, intravenous injection, epidural injection, intrathecal injection, intraportal injection, intratumoral injection, and topical administration. In various embodiments, the nucleic acid drug, including synthetic RNA, is formulated for intradermal (ID) injection to one or more of the dermis or epidermis. In various embodiments, the nucleic acid drug, including synthetic RNA, is administered in a manner such that it effects one or more of keratinocytes and fibroblasts (e.g. causes these cells to express one or more therapeutic proteins).

[0257] In some embodiments, the formulation comprises liposomes. In certain embodiments, nucleic acids are fully encapsulated within liposomes. In other embodiments, nucleic acids are partially encapsulated within liposomes. In still other embodiments, nucleic acids and liposomes are both present with no encapsulation of the nucleic acids within the liposomes.

[0258] Accordingly, the present invention provides various formulations as described herein. Further, in some embodiments, the formulations described herein find use in the various delivery and/or treatment methods of the present invention. For instance, formulations can comprise a vesicle, for instance, a liposome (see Langer, 1990, Science 249:1527-1533; Treat et al., in Liposomes in the Therapy of Infectious Disease and Cancer, Lopez-Berestein and Fidler (eds.), Liss, New York, pp. 353-365 (1989). In various embodiments, the formulation comprises an aqueous suspension of liposomes. Illustrative liposome components are set forth in Table 1, and are given by way of example, and not by way of limitation. In various embodiments, one or more, or two or more, or three or more, or four or more, or five or more of the lipids of Table 1 are combined in a formulation.

TABLE 1
Illustrative Biocompatible Lipids and Polymers

3β -[N-(N′,N1-dimethylaminoethane)-carbamoyl]cholesterol (DC-
Cholesterol)
1,2-dioleoyl-3-trimethylammonium-propane (DOTAP/18:1 TAP)
N-(4-carboxybenzyl)-N,N-dimethyl-2,3-bis(oleoyloxy)propan-1-
aminium (DOBAQ)
1,2-dimyristoyl-3-trimethylammonium-propane (14:0 TAP)
1,2-dipalmitoyl-3-trimethylammonium-propane (16:0 TAP)
1,2-stearoyl-3-trimethylammonium-propane (18:0 TAP)
1,2-dioleoyl-3-dimethylammonium-propane (DODAP/18:1 DAP)
1,2-dimyristoyl-3-dimethylammonium-propane (14:0 DAP)
1,2-dipalmitoyl-3-dimethylammonium-propane (16:0 DAP)
1,2-distearoyl-3-dimethylammonium-propane (18:0 DAP)
dimethyldioctadecylammonium (18:0 DDAB)
1,2-dilauroyl-sn-glycero-3-ethylphosphocholine (12:0 EthylPC)
1,2-dimyristoyl-sn-glycero-3-ethylphosphocholine (14:0 EthylPC)
1,2-dimyristoleoyl-sn-glycero-3-ethylphosphocholine (14:1 EthylPC)
1,2-dipalmitoyl-sn-glycero-3-ethylphosphocholine (16:0 EthylPC)
1,2-distearoyl-sn-glycero-3-ethylphosphocholine (18:0 EthylPC)
1,2-dioleoyl-sn-glycero-3-ethylphosphocholine (18:1 EthylPC)
1-palmitoyl-2-oleoyl-sn-glycero-3-ethylphosphocholine (16:1-18:1
EthylPC)
1,2-di-O-octadecenyl-3-trimethylammonium propane (DOTMA)
N1-[2-((1S)-1-[(3-aminopropyl)amino]-4-[di(3-amino-
propyl)amino]butylcarboxamido)ethyl]-
3,4-di[oleyloxy]-benzamide (MVL5)
2,3-dioleyloxy-N-[2-spermine carboxamide]ethyl-N,N-dimethyl-
1-propanammonium trifluoroacetate (DOSPA)
1,3-di-oleoyloxy-2-(6-carboxy-spermyl)-propylamid (DOSPER)
N-[1-(2,3-dimyristyloxy)propyl]-N,N-dimethyl-N-(2-
hydroxyethyl)ammonium bromide (DMRIE)
LIPOFECTAMINE, LIPOFECTAMINE 2000, LIPOFECTAMINE
RNAiMAX, LIPOFECTAMINE 3000,
LIPOFECTAMINE MessengerMAX, TransIT mRNA
dioctadecyl amidoglyceryl spermine (DOGS)
dioleoyl phosphatidyl ethanolamine (DOPE)
1,2-dilinoleyloxy-3-dimethylaminopropane (DLinDMA)
1,2-dilinoleyl-4-(2-dimethylaminoethyl)-[1,3]-dioxolane (DLin-KC2-
DMA)
Heptatriaconta-6,9,28,31-tetraen-19-yl 4-(dimethylamino)butanoate
(DLin-MC3-DMA)
1,2-distearoyl-sn-glycero-3-phosphocholine (18:0 PC DSPC)
1,2-dioleyl-sn-glycero-3-phosphocholine (18:1 PC)
1,2-distearyl-sn-glycero-3-phosphatidyl ethanolamine (DSPE)
1,2-dilinoleyl-3-dimethylammonium-propane (18:2 DAP)
hexadimethrine bromide (Polybrene ™)
DEAE-Dextran
protamine
protamine sulfate
poly-L-lysine
poly-D-lysine
Poly(beta-amino-ester) polymer
polyethyleneimine
block co-polymer comprising one or more of: PEG, PLGA, PPG, PEI,
PLL, PCL,
a PLURONIC

[0259] In some embodiments, the liposomes include LIPOFECTAMINE 3000. In some embodiments, the liposomes include one or more lipids described in U.S. Pat. Nos. 4,897,355 or 7,479,573 or in International Patent Publication No. WO/2015/089487, or in Feigner, P. L. et al. (1987) Proc. Natl. Acad. Sci. USA 84:7413-7417, the entire contents of each is incorporated by reference in their entireties).

[0260] In some embodiments, the liposome comprises N-[1-(2,3-dioleoyloxy)propyl]-N,N,N-trimethylammonium chloride (DOTMA). In some embodiments, the liposome comprises dioleoylphosphatidylethanolamine (DOPE).

[0261] In one embodiment, the liposomes include one or more polyethylene glycol (PEG) chains, optionally selected from PEG200, PEG300, PEG400, PEG600, PEG800, PEG1000, PEG1500, PEG2000, PEG3000, and PEG4000. In some embodiments, the PEG is PEG2000. In some embodiments, the liposomes include 1,2-distearoyl-sn-glycero-3-phosphoethanolamine (DSPE) or a derivative thereof. In one embodiment, the formulation comprises PEGylated lipid 1,2-distearoyl-sn-glycero-3-phosphoethanolamine-N-[methoxy(polyethylene glycol)-2000] (DSPE-PEG); in another embodiment, the formulation comprises 1,2-dimyristoyl-sn-glycero-3-phosphoethanolamine-N-[methoxy(polyethylene glycol)-2000] (DMPE-PEG); in yet another embodiment, the formulation comprises 1,2-dimyristoyl-rac-glycero-3-methoxypolyethylene glycol-2000 (DMG-PEG). In further embodiments, the formulation comprises a mixture of PEGylated lipids or free PEG chains.

[0262] In some embodiments, the formulation comprises one or more of N-(carbonyl-ethoxypolyethylene glycol 2000)-1,2-distearoyl-sn-glycero-3-phosphoethanolamine (MPEG2000-DSPE), fully hydrogenated phosphatidylcholine, cholesterol, LIPOFECTAMINE 3000, a cationic lipid, a polycationic lipid, and 1,2-distearoyl-sn-glycero-3-phosphoethanolamine-N-[folate(polyethylene glycol)-5000] (FA-MPEG5000-DSPE).

[0263] In one embodiment, the formulation comprises about 3.2 mg/mL N-(carbonyl-ethoxypolyethylene glycol 2000)-1,2-distearoyl-sn-glycero-3-phosphoethanolamine (MPEG2000-DSPE), about 9.6 mg/mL fully hydrogenated phosphatidylcholine, about 3.2 mg/mL cholesterol, about 2 mg/mL ammonium sulfate, and histidine as a buffer, with about 0.27 mg/mL 1,2-distearoyl-sn-glycero-3-phosphoethanolamine-N-[folate(polyethylene glycol)-5000] (FA-MPEG5000-DSPE) added to the lipid mixture. In another embodiment, the nucleic acids are complexed by combining 1 μL of LIPOFECTAMINE 3000 per about 1 μg of nucleic acid and incubating at room temperature for at least about 5 minutes. In one embodiment, the LIPOFECTAMINE 3000 is a solution comprising a lipid at a concentration of about 1 mg/mL. In some embodiments, nucleic acids are encapsulated by combining about 10 μg of the liposome formulation per about 1 μg of nucleic acid and incubating at room temperature for about 5 minutes.

[0264] In some embodiments, the formulation comprises one or more nanoparticles. In one embodiment, the nanoparticle is a polymeric nanoparticle. In various embodiments, the formulation comprises one or more of a diblock copolymer, a triblock copolymer, a tetrablock copolymer, and a multiblock copolymer. In various embodiments, the formulation comprises one or more of polymeric nanoparticles comprising a polyethylene glycol (PEG)-modified polylactic acid (PLA) diblock copolymer (PLA-PEG), PEG-polypropylene glycol-PEG-modified PLA-tetrablock copolymer (PLA-PEG-PPG-PEG), and Poly(lactic-co-glycolic acid) copolymer. In another embodiment, the formulation comprises a statistical, or an alternating, or a periodic copolymer, or any other sort of polymer.

[0265] In some embodiments, the formulation comprises one or more lipids that are described in WO/2000/027795, the entire contents of which are hereby incorporated by reference.

[0266] In some embodiments, the liposome comprises Polybrene™ (hexadimethrine bromide) as described in U.S. Pat. No. 5,627,159, the entire contents of which is incorporated herein by reference.

[0267] In various embodiments, the liposome components comprise one or more polymers. Examples of polymer include hexadimethrine bromide (Polybrene™), DEAE-Dextran, protamine, protamine sulfate, poly-L-lysine, or poly-D-lysine. These polymers may be used in combination with cationic lipids to result in synergistic effects on uptake by cells, stability of the formulation, including serum stability (e.g., stability in vivo), endosomal escape, cell viability, and protein expression.

[0268] It has now been discovered that liposomal formulations of synthetic RNA delivered to a lateral ventricle can efficiently transfect the tissue lining the ventricle, including ventricular ependymal cells. Certain embodiments are therefore directed to a method of delivering RNA to the central nervous system. In some embodiments, the formulation specifically targets one or more cell types. In some aspects, a cell-specific targeting ligand is included in the formulation. In other aspects, one or more cell types are targeted and other cell types are not targeted. By way of non-limiting example, intradermally-injected RNA may be formulated to target transfection of keratinocytes and avoid transfection of fibroblasts.

[0269] In some embodiments, the formulation comprises one or more polymers. In various embodiments, the formulation comprises polymers, or polymer nanoparticles, or hybrid lipid-polymer nanoparticles, or mixtures of liposomes and polymer nanoparticles, or mixtures of liposomes and free polymers, or mixtures of free lipids and polymer nanoparticles. In embodiments, the formulation comprises a poly(beta-amino-ester) polymer.

[0270] An aspect of the present invention is a composition comprising an effective amount of the synthetic RNA used in the method of any of the herein-disclosed aspects or embodiments.

[0271] In embodiments, having an injection volume of less than about 1 mL, less than about 0.5 mL, less than about 0.2 mL, less than about 0.1 mL, less than about 0.05 mL, less than about 0.02 mL, less than about 0.01 mL, less than about 0.005 mL, less than about 0.002 mL, or less than about 0.001 mL.

[0272] An aspect of the present invention is a pharmaceutical composition, comprising the composition of any of the preceding embodiments and aspects and a pharmaceutically-acceptable excipient.

[0273] In embodiments, use of the composition of any of the preceding embodiments and aspects, or the pharmaceutical composition of any of the preceding embodiments and aspects in the treatment of a disease or disorder described herein.

[0274] In embodiments, use of the composition of any of the preceding embodiments and aspects, or the pharmaceutical composition of any of the preceding embodiments and aspects in the manufacture of a medicament for the treatment of a disease or disorder described herein.

[0275] An aspect of the present invention is a composition comprising a synthetic RNA used in the method of any one of the preceding embodiments and aspects and formulated with one or more lipids and/or polymers selected from Table 1.

[0276] In some embodiments, liposomes are created using microfluidics. In one aspect, liposomes are manufactured using a Nanoassemblr instrument (Precision Nanosystems). In another aspect, syringe pumps are used to mix organic and aqueous solutions at a specified flowrate. Optionally, the ratio of the flowrate of the aqueous solution to that of the organic solution may be selected from about 1:1, about 2:1, about 3:1, about 4:1, about 5:1, about 6:1, about 8:1, or about 10:1. In some embodiments, the organic solution comprises one or more of ethanol, acetonitrile, dimethyl sulfoxide, and chloroform, or a mixture thereof. In other embodiments, other solvents are used.

[0277] In some aspects, liposomes are manufactured by dropwise mixture of one solution into another. In various other aspects, liposomes are manufactured with a spray mechanism, or by solvent evaporation, or by sonication, or by extrusion through one or more membranes, or through a process of self-assembly, or by a combination of methods.

[0278] In some embodiments, liposomes include lipids selected from one or more of the following categories: cationic lipids; anionic lipids; neutral lipids; multi-valent charged lipids; and zwitterionic lipids. In some cases, a cationic lipid may be used to facilitate a charge-charge interaction with nucleic acids. Several cationic lipids that accomplish this in certain embodiments of the invention are provided among the lipids of Table 1; these are provided for illustration only.

[0279] In various embodiments, the formulation comprises a cationic or polycationic lipid, a PEGylated lipid, and/or one or more helper lipids. In some embodiments, the helper lipid is a phospholipid; in other embodiments, the helper lipid is cholesterol; in still other embodiments, both a phospholipid and cholesterol are used as helper lipids. In one embodiment, the phospholipids 18:0 PC, 18:1 PC, 18:2 PE, DSPE, DOPE, 18:2 PE, ora combination thereof are used as helper lipids. In certain embodiments, cholesterol is derived from plant sources. Ifn other embodiments, cholesterol is derived from animal, fungal, bacterial or archaeal sources.

[0280] In any of the preceding embodiments and aspects, the effective amount of the synthetic RNA comprises one or more lipids and/or polymers to enhance uptake of RNA by cells.

[0281] In any of the preceding embodiments and aspects, the effective amount of the synthetic RNA comprises a cationic liposome and/or cationic polymer formulation.

[0282] In embodiments, a lipid and/or a polymer of the cationic liposome formulation is selected from Table 1.

[0283] An aspect of the present invention is a method of polynucleotide delivery to the central nervous system, comprising a synthetic polynucleotide formulated with a liposome comprising one or more lipids selected from Table 1.

[0284] In embodiments, the polynucleotide is a synthetic RNA.

[0285] In any of the preceding embodiments and aspects, the liposome comprises 1,2-dioleoyl-3-dimethylammonium-propane (DODAP).

[0286] In embodiments, the liposome further comprises one or more helper lipids, optionally selected from dioleoyl phosphatidyl ethanolamine (DOPE), 1,2-distearoyl-sn-glycero-3-phosphocholine (DSPC), and cholesterol.

[0287] In any of the preceding embodiments and aspects, the liposome further comprises a PEGylated lipid.

[0288] In any of the preceding embodiments and aspects, the subject in need is a human.

[0289] In any of the preceding embodiments and aspects, the effective amount of the synthetic RNA is administered about weekly, for at least 2 weeks.

[0290] In any of the preceding embodiments and aspects, the effective amount of the synthetic RNA is administered about every other week for at least one month.

[0291] In any of the preceding embodiments and aspects, the effective amount of the synthetic RNA is administered monthly or about every other month.

[0292] In any of the preceding embodiments and aspects, the effective amount of the synthetic RNA is administered for at least two months, or at least 4 months, or at least 6 months, or at least 9 months, or at least one year.

[0293] In any of the preceding embodiments and aspects, the synthetic RNA comprises 5-methoxyuridine.

[0294] The active compositions of the present invention may include classic pharmaceutical preparations. Administration of these compositions according to the present invention may be via any common route so long as the target tissue is available via that route. This includes oral, nasal, or buccal. Alternatively, administration may be by intradermal, subcutaneous, intramuscular, intraperitoneal, intraportal or intravenous injection, or by direct injection into diseased, e.g. cancer, tissue. The agents disclosed herein may also be administered by catheter systems. Such compositions would normally be administered as pharmaceutically acceptable compositions as described herein.

[0295] Administration of the compositions described herein may be, for example, by injection, topical administration, ophthalmic administration, and intranasal administration. The injection, in some embodiments, may be linked to an electrical force (e.g. electroporation, including with devices that find use in electrochemotherapy (e.g. CLINIPORATOR, IGEA Srl, Carpi [MO], Italy)). The topical administration may be, but is not limited to, a cream, lotion, ointment, gel, spray, solution and the like. The topical administration may further include a penetration enhancer such as, but not limited to, surfactants, fatty acids, bile salts, chelating agents, non-chelating non-surfactants, polyoxyethylene-9-lauryl ether, polyoxyethylene-20-cetyl ether, fatty acids and/or salts in combination with bile acids and/or salts, sodium salt in combination with lauric acid, capric acid and UDCA, and the like. The topical administration may also include a fragrance, a colorant, a sunscreen, an antibacterial, and/or a moisturizer. The compositions described herein may be administered to at least one site such as, but not limited to, forehead, scalp, hair follicles, hair, upper eyelids, lower eyelids, eyebrows, eyelashes, infraorbital area, periorbital areas, temple, nose, nose bridge, cheeks, tongue, nasolabial folds, lips, periobicular areas, jaw line, ears, neck, breast, forearm, upper arm, palm, hand, finger, nails, back, abdomen, sides, buttocks, thigh, calf, feet, toes and the like.

[0296] Routes of administration include, for example: intradermal, intramuscular, intraperitoneal, intravenous, subcutaneous, intranasal, epidural, oral, sublingual, intracerebral, intravaginal, transdermal, intraportal, rectally, by inhalation, or topically, particularly to the ears, nose, eyes, or skin. In some embodiments, the administering is effected orally or by parenteral injection.

[0297] Upon formulation, solutions may be administered in a manner compatible with the dosage formulation and in such amount as is therapeutically effective, as described herein. The formulations may easily be administered in a variety of dosage forms such as injectable solutions, drug release capsules and the like. For parenteral administration in an aqueous solution, for example, the solution generally is suitably buffered and the liquid diluent first rendered isotonic with, for example, sufficient saline or glucose. Such aqueous solutions may be used, for example, for intravenous, intramuscular, subcutaneous, and intraperitoneal administration. Preferably, sterile aqueous media are employed as is known to those of skill in the art, particularly in light of the present disclosure.

[0298] In various embodiments, the nucleic acid drug, including RNA comprising one or more non-canonical nucleotides, and/or formulations comprising the same, is administered locally, optionally by one or more of subcutaneous injection, intradermal injection, subdermal injection and intramuscular injection, and the effective dose is administered to a surface area of about 4 mm² to about 150 mm² (e.g. about, or no more than about, 4 mm², or about 5 mm², or about 6 mm², or about 7 mm², or about 8 mm², or about 10 mm², or about 20 mm², or about 50 mm², or about 100 mm², or about 150 mm²). In various embodiments, the nucleic acid drug, including RNA comprising one or more non-canonical nucleotides, and/or formulations comprising the same, is administered locally, optionally by one or more of subcutaneous injection, intradermal injection, subdermal injection and intramuscular injection, and the effective dose administered to a surface area of no more than about 4 mm², or about 5 mm², or about 6 mm², or about 7 mm², or about 8 mm², or about 10 mm², or about 20 mm², or about 50 mm², or about 100 mm², or about 150 mm². In various embodiments, the nucleic acid drug, including RNA comprising one or more non-canonical nucleotides, and/or formulations comprising the same, is administered locally, optionally by one or more of subcutaneous injection, intradermal injection, subdermal injection and intramuscular injection, and the effective dose administered to a surface area of about 4 mm², or about 5 mm², or about 6 mm², or about 7 mm², or about 8 mm², or about 10 mm², or about 20 mm², or about 50 mm², or about 100 mm², or about 150 mm².

[0299] In various embodiments, the nucleic acid drug, including RNA comprising one or more non-canonical nucleotides, and/or formulations comprising the same, is administered locally, optionally by one or more of subcutaneous injection, intradermal injection, subdermal injection and intramuscular injection, and the effective dose (weight RNA/surface area of injection) is about 35 ng/cm² to about 7000 ng/cm². In various embodiments, the nucleic acid drug, including RNA comprising one or more non-canonical nucleotides, and/or formulations comprising the same, is administered locally, optionally by one or more of subcutaneous injection, intradermal injection, subdermal injection and intramuscular injection, and the effective dose (weight RNA/surface area of injection) is no more than about 35 ng/cm², or about 50 ng/cm², or about 75 ng/cm², or about 100 ng/cm², or about 125 ng/cm², or about 150 ng/cm², or about 175 ng/cm², or about 200 ng/cm², or about 225 ng/cm², or about 250 ng/cm², or about 500 ng/cm², or about 1000 ng/cm², or about 2000 ng/cm², or about 5000 ng/cm², or about 7000 ng/cm². In various embodiments, the nucleic acid drug, including RNA comprising one or more non-canonical nucleotides, and/or formulations comprising the same, is administered locally, optionally by one or more of subcutaneous injection, intradermal injection, subdermal injection and intramuscular injection, and the effective dose (weight RNA/surface area of injection) is about 35 ng/cm², or about 50 ng/cm², or about 75 ng/cm², or about 100 ng/cm², or about 125 ng/cm², or about 150 ng/cm², or about 175 ng/cm², or about 200 ng/cm², or about 225 ng/cm², or about 250 ng/cm², or about 500 ng/cm², or about 1000 ng/cm², or about 2000 ng/cm², or about 5000 ng/cm², or about 7000 ng/cm².

[0300] Pharmaceutical preparations may additionally comprise delivery reagents (a.k.a. “transfection reagents”, a.k.a. “vehicles”, a.k.a. “delivery vehicles”) and/or excipients. Pharmaceutically acceptable delivery reagents, excipients, and methods of preparation and use thereof, including methods for preparing and administering pharmaceutical preparations to patients (a.k.a. “subjects”) are well known in the art, and are set forth in numerous publications, including, for example, in US Patent Appl. Pub. No. US 2008/0213377, the entirety of which is incorporated herein by reference.

[0301] For example, the present compositions can be in the form of pharmaceutically acceptable salts. Such salts include those listed in, for example, J. Pharma. Sci. 66, 2-19 (1977) and The Handbook of Pharmaceutical Salts; Properties, Selection, and Use. P. H. Stahl and C. G. Wermuth (eds.), Verlag, Zurich (Switzerland) 2002, which are hereby incorporated by reference in their entirety. Non-limiting examples of pharmaceutically acceptable salts include: sulfate, citrate, acetate, oxalate, chloride, bromide, iodide, nitrate, bisulfate, phosphate, acid phosphate, isonicotinate, lactate, salicylate, acid citrate, tartrate, oleate, tannate, pantothenate, bitartrate, ascorbate, succinate, maleate, gentisinate, fumarate, gluconate, glucaronate, saccharate, formate, benzoate, glutamate, methanesulfonate, ethanesulfonate, benzenesulfonate, p-toluenesulfonate, camphorsulfonate, pamoate, phenylacetate, trifluoroacetate, acrylate, chlorobenzoate, dinitrobenzoate, hydroxybenzoate, methoxybenzoate, methylbenzoate, o-acetoxybenzoate, naphthalene-2-benzoate, isobutyrate, phenylbutyrate, α-hydroxybutyrate, butyne-1,4-dicarboxylate, hexyne-1,4-dicarboxylate, caprate, caprylate, cinnamate, glycollate, heptanoate, hippurate, malate, hydroxymaleate, malonate, mandelate, mesylate, nicotinate, phthalate, teraphthalate, propiolate, propionate, phenylpropionate, sebacate, suberate, p-bromobenzenesulfonate, chlorobenzenesulfonate, ethylsulfonate, 2-hydroxyethylsulfonate, methylsulfonate, naphthalene-1-sulfonate, naphthalene-2-sulfonate, naphthalene-1,5-sulfonate, xylenesulfonate, tartarate salts, hydroxides of alkali metals such as sodium, potassium, and lithium; hydroxides of alkaline earth metal such as calcium and magnesium; hydroxides of other metals, such as aluminum and zinc; ammonia, and organic amines, such as unsubstituted or hydroxy-substituted mono-, di-, or tri-alkylamines, dicyclohexylamine; tributyl amine; pyridine; N-methyl, N-ethylamine; diethylamine; triethylamine; mono-, bis-, or tris-(2-0H-lower alkylamines), such as mono-; bis-, or tris-(2-hydroxyethyl)amine, 2-hydroxy-tert-butylamine, or tris-(hydroxymethyl)methylamine, N,N-di-lower alkyl-N-(hydroxyl-lower alkyl)-amines, such as N,N-dimethyl-N-(2-hydroxyethyl)amine or tri-(2-hydroxyethyl)amine; N-methyl-D-glucamine; and amino acids such as arginine, lysine, and the like.

[0302] The present pharmaceutical compositions can comprise excipients, including liquids such as water and oils, including those of petroleum, animal, vegetable, or synthetic origin, such as peanut oil, soybean oil, mineral oil, sesame oil and the like. The pharmaceutical excipients can be, for example, saline, gum acacia, gelatin, starch paste, talc, keratin, colloidal silica, urea, and the like. In addition, auxiliary, stabilizing, thickening, lubricating, and coloring agents can be used. In one embodiment, the pharmaceutically acceptable excipients are sterile when administered to a subject. Suitable pharmaceutical excipients also include starch, glucose, lactose, sucrose, gelatin, malt, rice, flour, chalk, silica gel, sodium stearate, glycerol monostearate, talc, sodium chloride, dried skim milk, glycerol, propylene, glycol, water, ethanol, and the like. Any agent described herein, if desired, can also comprise minor amounts of wetting or emulsifying agents, or pH buffering agents.

[0303] Dosage forms suitable for parenteral administration (e.g. subcutaneous, intradermal, subdermal, intramuscular, intravenous, intraperitoneal, intra-articular, and infusion) include, for example, solutions, suspensions, dispersions, emulsions, and the like. They may also be manufactured in the form of sterile solid compositions (e.g. lyophilized composition), which can be dissolved or suspended in sterile injectable medium immediately before use. They may contain, for example, suspending or dispersing agents known in the art.

[0304] In some embodiments, the formulations described herein may comprise albumin and a nucleic acid molecule.

[0305] In some embodiments, the invention relates to a cosmetic composition. In one embodiment, the cosmetic composition comprises albumin. In another embodiment, the albumin is treated with an ion-exchange resin or charcoal. In yet another embodiment, the cosmetic composition comprises a nucleic acid molecule. In a further embodiment, the cosmetic composition comprises both albumin and a nucleic acid molecule. Still other embodiments are directed to a cosmetic treatment article comprising a cosmetic composition contained in a device configured to deliver the composition to a patient. Still other embodiments are directed to a device configured to deliver a cosmetic composition to a patient. In one embodiment, the nucleic acid molecule encodes a member of the group: elastin, collagen, tyrosinase, melanocortin 1 receptor, keratin, filaggren, an antibody, and hyaluronan synthase or a biologically active fragment, variant, analogue or family member thereof.

[0306] Non-Canonical Nucleotides

[0307] In some embodiments, the present invention provides treatment regimens. The inventors have discovered that the doses and administration described herein can produce a substantial protein expression effect quickly (e.g. in about 6, or about 12, or about 24, or about 36, or about 48 hours). Further, these effects can be sustained for about 7 days, or longer. In some embodiments, the present methods provide for administration of a nucleic acid drug, including RNA comprising one or more non-canonical nucleotides, about weekly to about once every 20 weeks.

[0308] In some embodiments, the nucleic acid drug, including RNA comprising one or more non-canonical nucleotides, is administered about weekly, for at least 2 weeks (e.g. 3, or 4, or 5, or 6, or 7, or 8, or 9, or 10 weeks). In some embodiments, the nucleic acid drug, including RNA comprising one or more non-canonical nucleotides, is administered about every other week for at least one month (e.g. 1, or 2, or 3, or 4, or 5, or 6, or 12 months). In some embodiments, the nucleic acid drug, including RNA comprising one or more non-canonical nucleotides, is administered monthly or about every other month. In some embodiments, the nucleic acid drug, including RNA comprising one or more non-canonical nucleotides, is administered is administered for at least two months, or at least 4 months, or at least 6 months, or at least 9 months, or at least one year.

[0309] In some embodiments, the nucleic acid drug, including RNA comprising one or more non-canonical nucleotides, is administered about weekly, or about once every 2 weeks, or about once every 3 weeks, or about once every 4 weeks, or about once every 5 weeks, or about once every 6 weeks, or about once every 7 weeks, or about once every 8 weeks, or about once every 9 weeks, or about once every 10 weeks, or about once every 11 weeks, or about once every 12 weeks, or about once every 13 weeks, or about once every 14 weeks, or about once every 15 weeks, or about once every 20 weeks, or about once every 24 weeks.

[0310] In some embodiments, the nucleic acid drug, including RNA comprising one or more non-canonical nucleotides, is administered no more than about weekly, or about once every 2 weeks, or about once every 3 weeks, or about once every 4 weeks, or about once every 5 weeks, or about once every 6 weeks, or about once every 7 weeks, or about once every 8 weeks, or about once every 9 weeks, or about once every 10 weeks, or about once every 11 weeks, or about once every 12 weeks, or about once every 13 weeks, or about once every 14 weeks, or about once every 15 weeks, or about once every 20 weeks, or about 24 weeks.

[0311] Certain proteins have long half-lives, and can persist in tissues for several hours, days, weeks, months, or years. It has now been discovered that certain methods of treating a patient can result in accumulation of one or more proteins, including, for example, one or more beneficial proteins. Certain embodiments are therefore directed to a method for treating a patient comprising delivering to a patient in a series of doses a nucleic acid encoding one or more proteins. In one embodiment, the nucleic acid comprises RNA comprising one or more non-canonical nucleotides. In another embodiment, a first dose is given at a first time-point. In yet another embodiment, a second dose is given at a second time-point. In a further embodiment, the amount of at least one of the one or more proteins in the patient at the second time-point is greater than the amount of said protein at the first time-point. In a still further embodiment, the method results in the accumulation of said protein in the patient.

[0312] In various embodiments, the present invention relates to nucleic acid drugs, which, in various embodiments are RNA comprising one or more non-canonical nucleotides. Certain non-canonical nucleotides, when incorporated into RNA molecules, can reduce the toxicity of the RNA molecules, in part, without wishing to be bound by theory, by interfering with binding of proteins that detect exogenous nucleic acids, for example, protein kinase R, Rig-1 and the oligoadenylate synthetase family of proteins. Non-canonical nucleotides that have been reported to reduce the toxicity of RNA molecules when incorporated therein include pseudouridine, 5-methyluridine, 2-thiouridine, 5-methylcytidine, N6-methyladenosine, and certain combinations thereof. However, the chemical characteristics of non-canonical nucleotides that can enable them to lower the in vivo toxicity of RNA molecules have, until this point, remained unknown. Furthermore, incorporation of large amounts of most non-canonical nucleotides, for example, 5-methyluridine, 2-thiouridine, 5-methylcytidine, and N6-methyladenosine, can reduce the efficiency with which RNA molecules can be translated into protein, limiting the utility of RNA molecules containing these nucleotides in applications that require protein expression. In addition, while pseudouridine can be completely substituted for uridine in RNA molecules without reducing the efficiency with which the synthetic RNA molecules can be translated into protein, in certain situations, for example, when performing frequent, repeated transfections, synthetic RNA molecules containing only adenosine, guanosine, cytidine, and pseudouridine can exhibit excessive toxicity.

[0313] It has now been discovered that, and in some embodiments the invention pertains to, RNA molecules containing one or more non-canonical nucleotides that include one or more substitutions at the 2C and/or 4C and/or 5C positions in the case of a pyrimidine or the 6C and/or 7N and/or 8C positions in the case of a purine can be less toxic than synthetic RNA molecules containing only canonical nucleotides, due in part to the ability of substitutions at these positions to interfere with recognition of synthetic RNA molecules by proteins that detect exogenous nucleic acids, and furthermore, that substitutions at these positions can have minimal impact on the efficiency with which the synthetic RNA molecules can be translated into protein, due in part to the lack of interference of substitutions at these positions with base-pairing and base-stacking interactions.

[chemical structure]

[0314] Examples of non-canonical nucleotides that include one or more substitutions at the 2C and/or 4C and/or 5C positions in the case of a pyrimidine or the 6C and/or 7N and/or 8C positions in the case of a purine include, but are not limited to 2-thiouridine, 5-azauridine, pseudouridine, 4-thiouridine, 5-methyluridine, 5-methylpseudouridine, 5-aminouridine, 5-aminopseudouridine, 5-hydroxyuridine, 5-hydroxypseudouridine, 5-methoxyuridine, 5-methoxypseudouridine, 5-hydroxymethyluridine, 5-hydroxymethylpseudouridine, 5-carboxyuridine, 5-carboxypseudouridine, 5-formyluridine, 5-formylpseudouridine, 5-methyl-5-azauridine, 5-amino-5-azauridine, 5-hydroxy-5-azauridine, 5-methylpseudouridine, 5-aminopseudouridine, 5-hydroxypseudouridine, 4-thio-5-azauridine, 4-thiopseudouridine, 4-thio-5-methyluridine, 4-thio-5-aminouridine, 4-thio-5-hydroxyuridine, 4-thio-5-methyl-5-azauridine, 4-thio-5-amino-5-azauridine, 4-thio-5-hydroxy-5-azauridine, 4-thio-5-methylpseudouridine, 4-thio-5-aminopseudouridine, 4-thio-5-hydroxypseudouridine, 2-thiocytidine, 5-azacytidine, pseudoisocytidine, N4-methylcytidine, N4-aminocytidine, N4-hydroxycytidine, 5-methylcytidine, 5-aminocytidine, 5-hydroxycytidine, 5-methoxycytidine, 5-hydroxymethylcytidine, 5-carboxycytidine, 5-formylcytydine, 5-methyl-5-azacytidine, 5-amino-5-azacytidine, 5-hydroxy-5-azacytidine, 5-methylpseudoisocytidine, 5-aminopseudoisocytidine, 5-hydroxypseudoisocytidine, N4-methyl-5-azacytidine, N4-methylpseudoisocytidine, 2-thio-5-azacytidine, 2-thiopseudoisocytidine, 2-thio-N4-methylcytidine, 2-thio-N4-aminocytidine, 2-thio-N4-hydroxycytidine, 2-thio-5-methylcytidine, 2-thio-5-aminocytidine, 2-thio-5-hydroxycytidine, 2-thio-5-methyl-5-azacytidine, 2-thio-5-amino-5-azacytidine, 2-thio-5-hydroxy-5-azacytidine, 2-thio-5-methylpseudoisocytidine, 2-thio-5-aminopseudoisocytidine, 2-thio-5-hydroxypseudoisocytidine, 2-thio-N4-methyl-5-azacytidine, 2-thio-N4-methylpseudoisocytidine, N4-methyl-5-methylcytidine, N4-methyl-5-aminocytidine, N4-methyl-5-hydroxycytidine, N4-methyl-5-methyl-5-azacytidine, N4-methyl-5-amino-5-azacytidine, N4-methyl-5-hydroxy-5-azacytidine, N4-methyl-5-methylpseudoisocytidine, N4-methyl-5-aminopseudoisocytidine, N4-methyl-5-hydroxypseudoisocytidine, N4-amino-5-azacytidine, N4-aminopseudoisocytidine, N4-amino-5-methylcytidine, N4-amino-5-aminocytidine, N4-amino-5-hydroxycytidine, N4-amino-5-methyl-5-azacytidine, N4-amino-5-amino-5-azacytidine, N4-amino-5-hydroxy-5-azacytidine, N4-amino-5-methylpseudoisocytidine, N4-amino-5-aminopseudoisocytidine, N4-amino-5-hydroxypseudoisocytidine, N4-hydroxy-5-azacytidine, N4-hydroxypseudoisocytidine, N4-hydroxy-5-methylcytidine, N4-hydroxy-5-aminocytidine, N4-hydroxy-5-hydroxycytidine, N4-hydroxy-5-methyl-5-azacytidine, N4-hydroxy-5-amino-5-azacytidine, N4-hydroxy-5-hydroxy-5-azacytidine, N4-hydroxy-5-methylpseudoisocytidine, N4-hydroxy-5-aminopseudoisocytidine, N4-hydroxy-5-hydroxypseudoisocytidine, 2-thio-N4-methyl-5-methylcytidine, 2-thio-N4-methyl-5-aminocytidine, 2-thio-N4-methyl-5-hydroxycytidine, 2-thio-N4-methyl-5-methyl-5-azacytidine, 2-thio-N4-methyl-5-amino-5-azacytidine, 2-thio-N4-methyl-5-hydroxy-5-azacytidine, 2-thio-N4-methyl-5-methylpseudoisocytidine, 2-thio-N4-methyl-5-aminopseudoisocytidine, 2-thio-N4-methyl-5-hydroxypseudoisocytidine, 2-thio-N4-amino-5-azacytidine, 2-thio-N4-aminopseudoisocytidine, 2-thio-N4-amino-5-methylcytidine, 2-thio-N4-amino-5-aminocytidine, 2-thio-N4-amino-5-hydroxycytidine, 2-thio-N4-amino-5-methyl-5-azacytidine, 2-thio-N4-amino-5-amino-5-azacytidine, 2-thio-N4-amino-5-hydroxy-5-azacytidine, 2-thio-N4-amino-5-methylpseudoisocytidine, 2-thio-N4-amino-5-aminopseudoisocytidine, 2-thio-N4-amino-5-hydroxypseudoisocytidine, 2-thio-N4-hydroxy-5-azacytidine, 2-thio-N4-hydroxypseudoisocytidine, 2-thio-N4-hydroxy-5-methylcytidine, N4-hydroxy-5-aminocytidine, 2-thio-N4-hydroxy-5-hydroxycytidine, 2-thio-N4-hydroxy-5-methyl-5-azacytidine, 2-thio-N4-hydroxy-5-amino-5-azacytidine, 2-thio-N4-hydroxy-5-hydroxy-5-azacytidine, 2-thio-N4-hydroxy-5-methylpseudoisocytidine, 2-thio-N4-hydroxy-5-aminopseudoisocytidine, 2-thio-N4-hydroxy-5-hydroxypseudoisocytidine, N6-methyladenosine, N6-aminoadenosine, N6-hydroxyadenosine, 7-deazaadenosine, 8-azaadenosine, N6-methyl-7-deazaadenosine, N6-methyl-8-azaadenosine, 7-deaza-8-azaadenosine, N6-methyl-7-deaza-8-azaadenosine, N6-amino-7-deazaadenosine, N6-amino-8-azaadenosine, N6-amino-7-deaza-8-azaadenosine, N6-hydroxyadenosine, N6-hydroxy-7-deazaadenosine, N6-hydroxy-8-azaadenosine, N6-hydroxy-7-deaza-8-azaadenosine, 6-thioguanosine, 7-deazaguanosine, 8-azaguanosine, 6-thio-7-deazaguanosine, 6-thio-8-azaguanosine, 7-deaza-8-azaguanosine, 6-thio-7-deaza-8-azaguanosine, and 5-methoxyuridine.

[0315] In some embodiments, the invention relates to one or more non-canonical nucleotides selected from 5-hydroxycytidine, 5-methylcytidine, 5-hydroxymethylcytidine, 5-carboxycytidine, 5-formylcytidine, 5-methoxycytidine, 5-hydroxyuridine, 5-hydroxymethyluridine, 5-carboxyuridine, 5-formyluridine, 5-methoxyuridine, pseudouridine, 5-hydroxypseudouridine, 5-methylpseudouridine, 5-hydroxymethylpseudouridine, 5-carboxypseudouridine, 5-formylpseudouridine, and 5-methoxypseudouridine. In some embodiments, at least 50%, or at least 55%, or at least 60%, or at least 65%, or at least 70%, or at least 75%, or at least 80%, or at least 85%, or at least 90%, or at least 95%, or 100% of the non-canonical nucleotides are one or more of 5-hydroxycytidine, 5-methylcytidine, 5-hydroxymethylcytidine, 5-carboxycytidine, 5-formylcytidine, 5-methoxycytidine, 5-hydroxyuridine, 5-methyluridine, 5-hydroxymethyluridine, 5-carboxyuridine, 5-formyluridine, 5-methoxyuridine, pseudouridine, 5-hydroxypseudouridine, 5-methylpseudouridine, 5-hydroxymethylpseudouridine, 5-carboxypseudouridine, 5-formylpseudouridine, and 5-methoxypseudouridine.

[0316] In some embodiments, at least about 50%, or at least about 55%%, or at least 60%, or at least 65%, or at least 70%, or at least 75%, or at least 80%, or at least 85%, or at least 90%, or at least 95%, or 100% of cytidine residues are non-canonical nucleotides selected from 5-hydroxycytidine, 5-methylcytidine, 5-hydroxymethylcytidine, 5-carboxycytidine, 5-formylcytidine, 5-methoxycytidine.

[0317] In some embodiments, at least about 20%, or about 30%, or about 40%, or about 50%, or at least about 55%, or at least 60%, or at least 65%, or at least 70%, or at least 75%, or at least 80%, or at least 85%, or at least 90%, or at least 95%, or 100% of uridine residues are non-canonical nucleotides selected from 5-hydroxyuridine, 5-methyluridine, 5-hydroxymethyluridine, 5-carboxyuridine, 5-formyluridine, 5-methoxyuridine, pseudouridine, 5-hydroxypseudouridine, 5-methylpseudouridine, 5-hydroxymethylpseudouridine, 5-carboxypseudouridine, 5-formylpseudouridine, and 5-methoxypseudouridine.

[0318] In some embodiments, at least about 10% (e.g. 10%, or about 20%, or about 30%, or about 40%, or about 50%) of guanosine residues are non-canonical nucleotides, and the non-canonical nucleotide is optionally 7-deazaguanosine. In some embodiments, the RNA contains no more than about 50% 7-deazaguanosine in place of guanosine residues.

[0319] In some embodiments, the RNA does not contain non-canonical nucleotides in place of adenosine residues.

[0320] Note that alternative naming schemes exist for certain non-canonical nucleotides. For example, in certain situations, 5-methylpseudouridine can be referred to as “3-methylpseudouridine” or “N3-methylpseudouridine” or “1-methylpseudouridine” or “N1-methylpseudouridine”.

[0321] Nucleotides that contain the prefix “amino” can refer to any nucleotide that contains a nitrogen atom bound to the atom at the stated position of the nucleotide, for example, 5-aminocytidine can refer to 5-aminocytidine, 5-methylaminocytidine, and 5-nitrocytidine. Similarly, nucleotides that contain the prefix “methyl” can refer to any nucleotide that contains a carbon atom bound to the atom at the stated position of the nucleotide, for example, 5-methylcytidine can refer to 5-methylcytidine, 5-ethylcytidine, and 5-hydroxymethylcytidine, nucleotides that contain the prefix “thio” can refer to any nucleotide that contains a sulfur atom bound to the atom at the given position of the nucleotide, and nucleotides that contain the prefix “hydroxy” can refer to any nucleotide that contains an oxygen atom bound to the atom at the given position of the nucleotide, for example, 5-hydroxyuridine can refer to 5-hydroxyuridine and uridine with a methyl group bound to an oxygen atom, wherein the oxygen atom is bound to the atom at the 5C position of the uridine.

[0322] Certain embodiments are therefore directed to RNA comprising one or more non-canonical nucleotides, wherein the RNA molecule contains one or more nucleotides that includes one or more substitutions at the 2C and/or 4C and/or 5C positions in the case of a pyrimidine or the 6C and/or 7N and/or 8C positions in the case of a purine. Other embodiments are directed to a therapeutic, wherein the therapeutic contains one or more RNA molecules comprising one or more non-canonical nucleotides, and wherein the one or more RNA molecules comprising one or more non-canonical nucleotides contains one or more nucleotides that includes one or more substitutions at the 2C and/or 4C and/or 5C positions in the case of a pyrimidine or the 6C and/or 7N and/or 8C positions in the case of a purine. In one embodiment, the therapeutic comprises a transfection reagent. In another embodiment, the transfection reagent comprises a cationic lipid, liposome, or micelle. In still another embodiment, the liposome or micelle comprises folate and the therapeutic composition has anti-cancer activity. In another embodiment, the one or more nucleotides includes at least one of pseudouridine, 2-thiouridine, 4-thiouridine, 5-azauridine, 5-hydroxyuridine, 5-methyluridine, 5-aminouridine, 2-thiopseudouridine, 4-thiopseudouridine, 5-hydroxypseudouridine, 5-methylpseudouridine, 5-aminopseudouridine, pseudoisocytidine, N4-methylcytidine, 2-thiocytidine, 5-azacytidine, 5-hydroxycytidine, 5-aminocytidine, 5-methylcytidine, N4-methylpseudoisocytidine, 2-thiopseudoisocytidine, 5-hydroxypseudoisocytidine, 5-aminopseudoisocytidine, 5-methylpseudoisocytidine, 7-deazaadenosine, 7-deazaguanosine, 6-thioguanosine, and 6-thio-7-deazaguanosine. In another embodiment, the one or more nucleotides includes at least one of pseudouridine, 2-thiouridine, 4-thiouridine, 5-azauridine, 5-hydroxyuridine, 5-methyluridine, 5-aminouridine, 2-thiopseudouridine, 4-thiopseudouridine, 5-hydroxypseudouridine, 5-methylpseudouridine, and 5-aminopseudouridine and at least one of pseudoisocytidine, N4-methylcytidine, 2-thiocytidine, 5-azacytidine, 5-hydroxycytidine, 5-aminocytidine, 5-methylcytidine, N4-methylpseudoisocytidine, 2-thiopseudoisocytidine, 5-hydroxypseudoisocytidine, 5-aminopseudoisocytidine, and 5-methylpseudoisocytidine. In still another embodiment, the one or more nucleotides include at least one of pseudouridine, 2-thiouridine, 4-thiouridine, 5-azauridine, 5-hydroxyuridine, 5-methyluridine, 5-aminouridine, 2-thiopseudouridine, 4-thiopseudouridine, 5-hydroxypseudouridine, and 5-methylpseudouridine, 5-aminopseudouridine and at least one of pseudoisocytidine, N4-methylcytidine, 2-thiocytidine, 5-azacytidine, 5-hydroxycytidine, 5-aminocytidine, 5-methylcytidine, N4-methylpseudoisocytidine, 2-thiopseudoisocytidine, 5-hydroxypseudoisocytidine, 5-aminopseudoisocytidine, and 5-methylpseudoisocytidine and at least one of 7-deazaguanosine, 6-thioguanosine, 6-thio-7-deazaguanosine, and 5-methoxyuridine. In yet another embodiment, the one or more nucleotides includes 5-methylcytidine and 7-deazaguanosine. In another embodiment, the one or more nucleotides also includes pseudouridine or 4-thiouridine or 5-methyluridine or 5-aminouridine or 4-thiopseudouridine or 5-methylpseudouridine or 5-aminopseudouridine. In a still another embodiment, the one or more nucleotides also includes 7-deazaadenosine. In another embodiment, the one or more nucleotides includes pseudoisocytidine and 7-deazaguanosine and 4-thiouridine. In yet another embodiment, the one or more nucleotides includes pseudoisocytidine or 7-deazaguanosine and pseudouridine. In still another embodiment, the one or more nucleotides includes 5-methyluridine and 5-methylcytidine and 7-deazaguanosine. In a further embodiment, the one or more nucleotides includes pseudouridine or 5-methylpseudouridine and 5-methylcytidine and 7-deazaguanosine. In another embodiment, the one or more nucleotides includes pseudoisocytidine and 7-deazaguanosine and pseudouridine. In one embodiment, the RNA comprising one or more non-canonical nucleotides is present in vivo.

[0323] Certain non-canonical nucleotides can be incorporated more efficiently than other non-canonical nucleotides into RNA molecules by RNA polymerases that are commonly used for in vitro transcription, due in part to the tendency of these certain non-canonical nucleotides to participate in standard base-pairing interactions and base-stacking interactions, and to interact with the RNA polymerase in a manner similar to that in which the corresponding canonical nucleotide interacts with the RNA polymerase. As a result, certain nucleotide mixtures containing one or more non-canonical nucleotides can be beneficial in part because in vitro-transcription reactions containing these nucleotide mixtures can yield a large quantity of RNA. Certain embodiments are therefore directed to a nucleotide mixture containing one or more nucleotides that includes one or more substitutions at the 2C and/or 4C and/or 5C positions in the case of a pyrimidine or the 6C and/or 7N and/or 8C positions in the case of a purine. Nucleotide mixtures include, but are not limited to (numbers preceding each nucleotide indicate an exemplary fraction of the non-canonical nucleotide triphosphate in an in vitro-transcription reaction, for example, 0.2 pseudoisocytidine refers to a reaction containing adenosine-5′-triphosphate, guanosine-5′-triphosphate, uridine-5′-triphosphate, cytidine-5′-triphosphate, and pseudoisocytidine-5′-triphosphate, wherein pseudoisocytidine-5′-triphosphate is present in the reaction at an amount approximately equal to 0.2 times the total amount of pseudoisocytidine-5′-triphosphate+cytidine-5′-triphosphate that is present in the reaction, with amounts measured either on a molar or mass basis, and wherein more than one number preceding a nucleoside indicates a range of exemplary fractions): 1.0 pseudouridine, 0.1-0.8 2-thiouridine, 0.1-0.8 5-methyluridine, 0.2-1.0 5-hydroxyuridine, 0.2-1.0 5-methoxyuridine, 0.1-1.0 5-aminouridine, 0.1-1.0 4-thiouridine, 0.1-1.0 2-thiopseudouridine, 0.1-1.0 4-thiopseudouridine, 0.1-1.0 5-hydroxypseudouridine, 0.2-1 5-methylpseudouridine, 0.2-1.0 5-methoxypseudouridine, 0.1-1.0 5-aminopseudouridine, 0.2-1.0 2-thiocytidine, 0.1-0.8 pseudoisocytidine, 0.2-1.0 5-methylcytidine, 0.2-1.0 5-hydroxycytidine, 0.2-1.0 5-hydroxymethylcytidine, 0.2-1.0 5-methoxycytidine, 0.1-1.0 5-aminocytidine, 0.2-1.0 N4-methylcytidine, 0.2-1.0 5-methylpseudoisocytidine, 0.2-1.0 5-hydroxypseudoisocytidine, 0.2-1.0 5-aminopseudoisocytidine, 0.2-1.0 N4-methylpseudoisocytidine, 0.2-1.0 2-thiopseudoisocytidine, 0.2-1.0 7-deazaguanosine, 0.2-1.0 6-thioguanosine, 0.2-1.0 6-thio-7-deazaguanosine, 0.2-1.0 8-azaguanosine, 0.2-1.0 7-deaza-8-azaguanosine, 0.2-1.0 6-thio-8-azaguanosine, 0.1-0.5 7-deazaadenosine, and 0.1-0.5 N6-methyladenosine.

[0324] In various embodiments, the RNA comprising one or more non-canonical nucleotides composition or synthetic polynucleotide composition (e.g., which may be prepared by in vitro transcription) contains substantially or entirely the canonical nucleotide at positions having adenine or “A” in the genetic code. The term “substantially” in this context refers to at least 90%. In these embodiments, the RNA composition or synthetic polynucleotide composition may further contain (e.g., consist of) 7-deazaguanosine at positions with “G” in the genetic code as well as the corresponding canonical nucleotide “G”, and the canonical and non-canonical nucleotide at positions with G may be in the range of 5:1 to 1:5, or in some embodiments in the range of 2:1 to 1:2. In these embodiments, the RNA composition or synthetic polynucleotide composition may further contain (e.g., consist of) one or more (e.g., two, three or four) of 5-hydroxycytidine, 5-methylcytidine, 5-hydroxymethylcytidine, 5-carboxycytidine, 5-formylcytidine, 5-methoxycytidine at positions with “C” in the genetic code as well as the canonical nucleotide “C”, and the canonical and non-canonical nucleotide at positions with C may be in the range of 5:1 to 1:5, or in some embodiments in the range of 2:1 to 1:2. In some embodiments, the level of non-canonical nucleotide at positions of “C” are as described in the preceding paragraph. In these embodiments, the RNA composition or synthetic polynucleotide composition may further contain (e.g., consist of) one or more (e.g., two, three, or four) of 5-hydroxyuridine, 5-methyluridine, 5-hydroxymethyluridine, 5-carboxyuridine, 5-formyluridine, 5-methoxyuridine, pseudouridine, 5-hydroxypseudouridine, 5-methylpseudouridine, 5-hydroxymethylpseudouridine, 5-carboxypseudouridine, 5-formylpseudouridine, and 5-methoxypseudouridineat positions with “U” in the genetic code as well as the canonical nucleotide “U”, and the canonical and non-canonical nucleotide at positions with “U” may be in the range of 5:1 to 1:5, or in some embodiments in the range of 2:1 to 1:2. In some embodiments, the level of non-canonical nucleotide at positions of “U” are as described in the preceding paragraph.

[0325] It has now been discovered that combining certain non-canonical nucleotides can be beneficial in part because the contribution of non-canonical nucleotides to lowering the toxicity of RNA molecules can be additive. Certain embodiments are therefore directed to a nucleotide mixture, wherein the nucleotide mixture contains more than one of the non-canonical nucleotides listed above, for example, the nucleotide mixture contains both pseudoisocytidine and 7-deazaguanosine or the nucleotide mixture contains both N4-methylcytidine and 7-deazaguanosine, etc. In one embodiment, the nucleotide mixture contains more than one of the non-canonical nucleotides listed above, and each of the non-canonical nucleotides is present in the mixture at the fraction listed above, for example, the nucleotide mixture contains 0.1-0.8 pseudoisocytidine and 0.2-1.0 7-deazaguanosine or the nucleotide mixture contains 0.2-1.0 N4-methylcytidine and 0.2-1.0 7-deazaguanosine, etc.

[0326] In certain situations, for example, when it may not be necessary or desirable to maximize the yield of an in vitro-transcription reaction, nucleotide fractions other than those given above may be used. The exemplary fractions and ranges of fractions listed above relate to nucleotide-triphosphate solutions of typical purity (greater than 90% purity). Larger fractions of these and other nucleotides can be used by using nucleotide-triphosphate solutions of greater purity, for example, greater than about 95% purity or greater than about 98% purity or greater than about 99% purity or greater than about 99.5% purity, which can be achieved, for example, by purifying the nucleotide triphosphate solution using existing chemical-purification technologies such as high-pressure liquid chromatography (HPLC) or by other means. In one embodiment, nucleotides with multiple isomers are purified to enrich the desired isomer.

[0327] Other embodiments are directed to a method for inducing a cell in vivo to express a protein of interest by contacting the cell with a RNA molecule that contains one or more non-canonical nucleotides that includes one or more substitutions at the 2C and/or 4C and/or 5C positions in the case of a pyrimidine or the 6C and/or 7N and/or 8C positions in the case of a purine. Still other embodiments are directed to a method for transfecting, reprogramming, and/or gene-editing a cell in vivo by contacting the cell with a RNA molecule that contains one or more non-canonical nucleotides that includes one or more substitutions at the 2C and/or 4C and/or 5C positions in the case of a pyrimidine or the 6C and/or 7N and/or 8C positions in the case of a purine. In one embodiment, the RNA molecule is produced by in vitro transcription. In one embodiment, the RNA molecule encodes one or more reprogramming factors. In another embodiment, the one or more reprogramming factors includes Oct4 protein. In another embodiment, the cell is also contacted with a RNA molecule that encodes Sox2 protein. In yet another embodiment, the cell is also contacted with a RNA molecule that encodes Klf4 protein. In yet another embodiment, the cell is also contacted with a RNA molecule that encodes c-Myc protein. In yet another embodiment, the cell is also contacted with a RNA molecule that encodes Lin28 protein.

[0328] Enzymes such as T7 RNA polymerase may preferentially incorporate canonical nucleotides in an in vitro-transcription reaction containing both canonical and non-canonical nucleotides. As a result, an in vitro-transcription reaction containing a certain fraction of a non-canonical nucleotide may yield RNA containing a different, often lower, fraction of the non-canonical nucleotide than the fraction at which the non-canonical nucleotide was present in the reaction. In certain embodiments, references to nucleotide incorporation fractions (for example, “a synthetic RNA molecule containing 50% pseudoisocytidine” or “0.1-0.8 pseudoisocytidine”) therefore can refer both to RNA molecules containing the stated fraction of the nucleotide, and to RNA molecules synthesized in a reaction containing the stated fraction of the nucleotide (or nucleotide derivative, for example, nucleotide-triphosphate), even though such a reaction may yield RNA containing a different fraction of the nucleotide than the fraction at which the non-canonical nucleotide was present in the reaction.

[0329] Different nucleotide sequences can encode the same protein by utilizing alternative codons. In certain embodiments, references to nucleotide incorporation fractions therefore can refer both to RNA molecules containing the stated fraction of the nucleotide, and to RNA molecules encoding the same protein as a different RNA molecule, wherein the different RNA molecule contains the stated fraction of the nucleotide.

[0330] It has now been discovered that the non-canonical nucleotide members of the 5-methylcytidine de-methylation pathway, when incorporated into synthetic RNA, can increase the efficiency with which the synthetic RNA can be translated into protein in vivo, and can decrease the toxicity of the synthetic RNA in vivo. These non-canonical nucleotides include, for example: 5-methylcytidine, 5-hydroxymethylcytidine, 5-formylcytidine, and 5-carboxycytidine (a.k.a. “cytidine-5-carboxylic acid”). Certain embodiments are therefore directed to a nucleic acid. In some embodiments, the nucleic acid is present in vivo. In one embodiment, the nucleic acid is a synthetic RNA molecule. In another embodiment, the nucleic acid comprises one or more non-canonical nucleotides. In one embodiment, the nucleic acid comprises one or more non-canonical nucleotide members of the 5-methylcytidine de-methylation pathway. In another embodiment, the nucleic acid comprises at least one of 5-methylcytidine, 5-hydroxymethylcytidine, 5-formylcytidine, and 5-carboxycytidine or a derivative thereof. In a further embodiment, the nucleic acid comprises at least one of pseudouridine, 5-methylpseudouridine, 5-hydroxyuridine, 5-methyluridine, 5-methylcytidine, 5-hydroxymethylcytidine, N4-methylcytidine, N4-acetylcytidine, and 7-deazaguanosine or a derivative thereof.

### 5-methylcytidine De-Methylation Pathway

[chemical structure]

[0332] Certain embodiments are directed to a protein. Other embodiments are directed to a nucleic acid that encodes a protein. In one embodiment, the protein is a protein of interest. In another embodiment, the protein is selected from a reprogramming protein and a gene-editing protein. In one embodiment, the nucleic acid is a plasmid. In another embodiment, the nucleic acid is present in a virus or viral vector. In a further embodiment, the virus or viral vector is replication incompetent. In a still further embodiment, the virus or viral vector is replication competent. In one embodiment, the virus or viral vector includes at least one of an adenovirus, a retrovirus, a lentivirus, a herpes virus, an adeno-associated virus or a natural or engineered variant thereof, and an engineered virus.

[0333] It has also been discovered that certain combinations of non-canonical nucleotides can be particularly effective at increasing the efficiency with which synthetic RNA can be translated into protein in vivo, and decreasing the toxicity of synthetic RNA in vivo, for example, the combinations: 5-methyluridine and 5-methylcytidine, 5-hydroxyuridine and 5-methylcytidine, 5-hydroxyuridine and 5-hydroxymethylcytidine, 5-methyluridine and 7-deazaguanosine, 5-methylcytidine and 7-deazaguanosine, 5-methyluridine, 5-methylcytidine, and 7-deazaguanosine, and 5-methyluridine, 5-hydroxymethylcytidine, and 7-deazaguanosine. Certain embodiments are therefore directed to a nucleic acid comprising at least two of 5-methyluridine, 5-methylcytidine, 5-hydroxymethylcytidine, and 7-deazaguanosine or one or more derivatives thereof. Other embodiments are directed to a nucleic acid comprising at least three of 5-methyluridine, 5-methylcytidine, 5-hydroxymethylcytidine, and 7-deazaguanosine or one or more derivatives thereof. Other embodiments are directed to a nucleic acid comprising all of 5-methyluridine, 5-methylcytidine, 5-hydroxymethylcytidine, and 7-deazaguanosine or one or more derivatives thereof. In one embodiment, the nucleic acid comprises one or more 5-methyluridine residues, one or more 5-methylcytidine residues, and one or more 7-deazaguanosine residues or one or more 5-methyluridine residues, one or more 5-hydroxymethylcytidine residues, and one or more 7-deazaguanosine residues.

[0334] It has been further discovered that synthetic RNA molecules containing certain fractions of certain non-canonical nucleotides and combinations thereof can exhibit particularly high translation efficiency and low toxicity in vivo. Certain embodiments are therefore directed to a nucleic acid comprising at least one of one or more uridine residues, one or more cytidine residues, and one or more guanosine residues, and comprising one or more non-canonical nucleotides. In one embodiment, between about 20% and about 80% of the uridine residues are 5-methyluridine residues. In another embodiment, between about 30% and about 50% of the uridine residues are 5-methyluridine residues. In a further embodiment, about 40% of the uridine residues are 5-methyluridine residues. In one embodiment, between about 60% and about 80% of the cytidine residues are 5-methylcytidine residues. In another embodiment, between about 80% and about 100% of the cytidine residues are 5-methylcytidine residues. In a further embodiment, about 100% of the cytidine residues are 5-methylcytidine residues. In a still further embodiment, between about 20% and about 100% of the cytidine residues are 5-hydroxymethylcytidine residues. In one embodiment, between about 20% and about 80% of the guanosine residues are 7-deazaguanosine residues. In another embodiment, between about 40% and about 60% of the guanosine residues are 7-deazaguanosine residues. In a further embodiment, about 50% of the guanosine residues are 7-deazaguanosine residues. In one embodiment, between about 20% and about 80% or between about 30% and about 60% or about 40% of the cytidine residues are N4-methylcytidine and/or N4-acetylcytidine residues. In another embodiment, each cytidine residue is a 5-methylcytidine residue. In a further embodiment, about 100% of the cytidine residues are 5-methylcytidine residues and/or 5-hydroxymethylcytidine residues and/or N4-methylcytidine residues and/or N4-acetylcytidine residues and/or one or more derivatives thereof. In a still further embodiment, about 40% of the uridine residues are 5-methyluridine residues, between about 20% and about 100% of the cytidine residues are N4-methylcytidine and/or N4-acetylcytidine residues, and about 50% of the guanosine residues are 7-deazaguanosine residues. In one embodiment, about 40% of the uridine residues are 5-methyluridine residues and about 100% of the cytidine residues are 5-methylcytidine residues. In another embodiment, about 40% of the uridine residues are 5-methyluridine residues and about 50% of the guanosine residues are 7-deazaguanosine residues. In a further embodiment, about 100% of the cytidine residues are 5-methylcytidine residues and about 50% of the guanosine residues are 7-deazaguanosine residues. In a further embodiment, about 100% of the uridine residues are 5-hydroxyuridine residues. In one embodiment, about 40% of the uridine residues are 5-methyluridine residues, about 100% of the cytidine residues are 5-methylcytidine residues, and about 50% of the guanosine residues are 7-deazaguanosine residues. In another embodiment, about 40% of the uridine residues are 5-methyluridine residues, between about 20% and about 100% of the cytidine residues are 5-hydroxymethylcytidine residues, and about 50% of the guanosine residues are 7-deazaguanosine residues. In some embodiments, less than 100% of the cytidine residues are 5-methylcytidine residues. In other embodiments, less than 100% of the cytidine residues are 5-hydroxymethylcytidine residues. In one embodiment, each uridine residue in the synthetic RNA molecule is a pseudouridine residue or a 5-methylpseudouridine residue. In another embodiment, about 100% of the uridine residues are pseudouridine residues and/or 5-methylpseudouridine residues. In a further embodiment, about 100% of the uridine residues are pseudouridine residues and/or 5-methylpseudouridine residues, about 100% of the cytidine residues are 5-methylcytidine residues, and about 50% of the guanosine residues are 7-deazaguanosine residues.

[0335] Other non-canonical nucleotides that can be used in place of or in combination with 5-methyluridine include, but are not limited to pseudouridine, 5-hydroxyuridine, 5-hydroxypseudouridine, 5-methoxyuridine, 5-methoxypseudouridine, 5-carboxyuridine, 5-carboxypseudouridine, 5-formyluridine, 5-formylpseudouridine, 5-hydroxymethyluridine, 5-hydroxymethylpseudouridine, and 5-methylpseudouridine (“1-methylpseudouridine”, “N1-methylpseudouridine”) or one or more derivatives thereof. Other non-canonical nucleotides that can be used in place of or in combination with 5-methylcytidine and/or 5-hydroxymethylcytidine include, but are not limited to pseudoisocytidine, 5-methylpseudoisocytidine, 5-hydroxymethylcytidine, 5-formylcytidine, 5-carboxycytidine, 5-methoxycytidine, N4-methylcytidine, N4-acetylcytidine or one or more derivatives thereof. In certain embodiments, for example, when performing only a single transfection, injection or delivery or when the cells, tissue, organ or patient being transfected, injected or delivered to are not particularly sensitive to transfection-associated toxicity or innate-immune signaling, the fractions of non-canonical nucleotides can be reduced. Reducing the fraction of non-canonical nucleotides can be beneficial, in part, because reducing the fraction of non-canonical nucleotides can reduce the cost of the nucleic acid. In certain situations, for example, when minimal immunogenicity of the nucleic acid is desired, the fractions of non-canonical nucleotides can be increased.

[0336] Enzymes such as T7 RNA polymerase may preferentially incorporate canonical nucleotides in an in vitro-transcription reaction containing both canonical and non-canonical nucleotides. As a result, an in vitro-transcription reaction containing a certain fraction of a non-canonical nucleotide may yield RNA containing a different, often lower, fraction of the non-canonical nucleotide than the fraction at which the non-canonical nucleotide was present in the reaction. In certain embodiments, references to nucleotide incorporation fractions (for example, “50% 5-methyluridine”) therefore can refer both to nucleic acids containing the stated fraction of the nucleotide, and to nucleic acids synthesized in a reaction containing the stated fraction of the nucleotide (or nucleotide derivative, for example, nucleotide-triphosphate), even though such a reaction may yield a nucleic acid containing a different fraction of the nucleotide than the fraction at which the non-canonical nucleotide was present in the reaction. In addition, different nucleotide sequences can encode the same protein by utilizing alternative codons. In certain embodiments, references to nucleotide incorporation fractions therefore can refer both to nucleic acids containing the stated fraction of the nucleotide, and to nucleic acids encoding the same protein as a different nucleic acid, wherein the different nucleic acid contains the stated fraction of the nucleotide.

[0337] Untranslated Regions (UTRs)

[0338] Certain embodiments are directed to a nucleic acid comprising a 5′-cap structure selected from Cap 0, Cap 1, Cap 2, and Cap 3 or a derivative thereof. In one embodiment, the nucleic acid comprises one or more UTRs. In another embodiment, the one or more UTRs increase the stability of the nucleic acid. In a further embodiment, the one or more UTRs comprise an alpha-globin or beta-globin 5′-UTR. In a still further embodiment, the one or more UTRs comprise an alpha-globin or beta-globin 3′-UTR. In a still further embodiment, the synthetic RNA molecule comprises an alpha-globin or beta-globin 5′-UTR and an alpha-globin or beta-globin 3′-UTR. In one embodiment, the 5′-UTR comprises a Kozak sequence that is substantially similar to the Kozak consensus sequence. In another embodiment, the nucleic acid comprises a 3′-poly(A) tail. In a further embodiment, the 3′-poly(A) tail is between about 20 nt and about 250 nt or between about 120 nt and about 150 nt long. In a further embodiment, the 3′-poly(A) tail is about 20 nt, or about 30 nt, or about 40 nt, or about 50 nt, or about 60 nt, or about 70 nt, or about 80 nt, or about 90 nt, or about 100 nt, or about 110 nt, or about 120 nt, or about 130 nt, or about 140 nt, or about 150 nt, or about 160 nt, or about 170 nt, or about 180 nt, or about 190 nt, or about 200 nt, or about 210 nt, or about 220 nt, or about 230 nt, or about 240 nt, or about 250 nt long.

[0339] It has now been discovered that poly(A) tails produced by poly(A) polymerase may vary in length depending on reaction conditions including reaction time and enzyme activity, and that an enzymatic tailing reaction may produce a mixture of RNA molecules having poly(A) tails of varied lengths. Certain embodiments are directed to a synthetic RNA molecule containing a tail of about 10, about 20, about 30, about 40, about 50, about 75, about 100, about 125, about 150, about 175, about 200, about 225, about 250, about 275, about 300, about 325, about 350, or about 400, or more than about 400 nucleotides. In one embodiment, the tail is a poly(A) tail. Other embodiments are directed to a tail containing fewer than about 10 nucleotides.

[0340] It has now been discovered that synthesizing RNA using a template that encodes a tail can enable increased control over the length of the tail and reduced variability within or among reactions. Certain embodiments are therefore directed to a template encoding a tail. In certain embodiments, the tail contains about 10, about 20, about 30, about 40, about 50, about 75, about 100, about 125, about 150, about 175, about 200, about 225, about 250, about 275, about 300, about 325, about 350, or about 400 nucleotides. Other embodiments are directed to a synthetic RNA molecule synthesized using a template that encodes a tail.

[0341] Exon Skipping

[0342] Cells can be induced to “skip” over faulty sections of pre-mRNA molecules by interfering with mRNA splicing. Such “exon skipping” can thus lead to a truncated, yet functional protein despite the presence of a genetic mutation. Exon skipping involves binding an antisense oligonucleotide to a splice site in a pre-mRNA molecule. When the pre-mRNA that is bound by the antisense oligonucleotide is processed into a mature mRNA, the corresponding exon can be “skipped” over, which, for example, can restore a disrupted reading frame caused by the mutation. Exon skipping can allow translation of an internally-deleted, but largely functional protein. However, current exon skipping methods are limited by the transience of the antisense oligonucleotide, and a persistent effect can thus require that the antisense oligonucleotide be continuously present in a patient's cells. Otherwise, if the cell lacks or possesses a sub-optimal amount of the antisense oligonucleotide, mature mRNA comprising a mutation can be processed and ultimately translated into a defective protein. Consequently, current exon skipping methods are limited by the need to provide the antisense oligonucleotide to the patient chronically and/or regularly.

[0343] An aspect of the present invention is a method for treating a disease or disorder caused by a mutation in a gene, the method comprising administering to a subject in need thereof and comprising the mutation in the gene an effective amount of a synthetic RNA encoding a gene-editing protein capable of creating a single-strand or double-strand break in the gene, wherein the single-strand or double-strand break causes persistent altered splicing of the gene.

[0344] In embodiments, the altered splicing results in expression of a truncated protein which lacks at least the polypeptide sequence corresponding to an exon containing the mutation.

[0345] In embodiments, the single-strand or double-strand break removes a splice acceptor site or produces a non-functional splice acceptor site in or near an exon of the gene or removes a splice donor site or produces a non-functional splice donor site in or near an exon of the gene.

[0346] In embodiments, the gene-editing protein creates a non-functional splice acceptor site that is within about 1 kb or about 0.5 kb or about 0.1 kb of the exon.

[0347] In embodiments, the mutation causes altered splicing of the gene and the single-strand or double-strand break causes the expression of a functional gene product.

[0348] In embodiments, the mutation inactivates a splice acceptor site or a splice donor site and the single-strand or double-strand break restores a functional exon.

[0349] In any of the preceding embodiments and aspect, the single-strand or double-strand break is within about 1 kb or about 0.5 kb or about 0.1 kb of the exon.

[0350] In any of the preceding embodiments and aspect, the non-functional splice acceptor site causes excision of the exon when a pre-mRNA comprising the exon is processed into mRNA.

[0351] In embodiments, the gene-editing protein creates a non-functional splice donor site in an intron that is within about 1 kb or about 0.5 kb or about 0.1 kb of the exon.

[0352] In any of the preceding embodiments and aspect, the non-functional splice donor site causes excision of the exon when a pre-mRNA comprising the exon is processed into mRNA.

[0353] In any of the preceding embodiments and aspect, wherein the exon comprises a mutation.

[0354] In embodiments, the mutation is a nonsense mutation, a frame shift mutation, or a mutation that introduces a premature stop codon.

[0355] In any of the preceding embodiments and aspect, wherein the mRNA is translated into a truncated protein which retains a function of the full-length protein.

[0356] In any of the preceding embodiments and aspect, wherein the exon encodes a polypeptide sequence comprising a peptide splice site.

[0357] In embodiments, the mRNA is translated into a polypeptide which lacks the peptide splice site.

[0358] In embodiments, the cleavage site is a protease cleavage site or a caspase cleavage site.

[0359] In any of the preceding embodiments and aspect, wherein the exon encodes a polypeptide sequence comprising a cleavage site.

[0360] In embodiments, the mRNA is translated into a polypeptide which lacks the cleavage site.

[0361] In any of the preceding embodiments and aspect, the truncated protein possesses a function of the wild-type protein.

[0362] In any of the preceding embodiments and aspect, the gene-editing protein is selected from a TALEN, a meganuclease, a nuclease, a zinc finger nuclease, a CRISPR-associated protein, CRISPR/Cas9, Cas9, xCas9, Cas12a (Cpf1), Cas13a, Cas14, CasX, CasY, a Class 1 Cas protein, a Class 2 Cas protein, and MAD7.

[0363] In any of the preceding embodiments and aspect, the gene-editing protein comprises: (a) a DNA-binding domain comprising a plurality of repeat sequences and at least one of the repeat sequences comprises the amino acid sequence: LTPvQWAIAwxyzGHGG (SEQ ID NO: 629), wherein: “v” is Q, D or E, “w” is S or N, “x” is H, N, or I, “y” is D, A, I, N, G, H, K, S, or null, and “z” is GGKQALETVQRLLPVLCQD (SEQ ID NO: 630) or GGKQALETVQRLLPVLCQA (SEQ ID NO: 631); and (b) a nuclease domain comprising a catalytic domain of a nuclease.

[0364] In embodiments, the nuclease domain is capable of forming a dimer with another nuclease domain.

[0365] In any of the preceding embodiments and aspect, the nuclease domain comprises the catalytic domain of a protein comprising the amino acid sequence of SEQ ID NO: 632.

[0366] In any of the preceding embodiments and aspect, at least one of the repeat sequences comprising the amino acid sequence LTPvQVVAIAwxyzGHGG (SEQ ID NO: 629) is between 36 and 39 amino acids long.

[0367] In any of the preceding embodiments and aspect, the gene is selected from ABCA4, ADAMTS-13, APP, ATP6AP2, CEP290, COL17A1, COL4A3, COL4A4, COL4A5, COL6A1, COL6A2, COL6A3, COL7A1, DMD, DMD, FUS, FXN, GABRG2, HNRPDL, HTT, IKBKAP, ITGA6, ITGB4, LAMA3, LAMB3, LAMC2, LMNA, LMNA, LMNA, LMNA, LMNB1, MAPT, PINK1, PRPF6, RBM20, RNU4ATAC, SMN1, SNRNP200, TARDP, TCF4, TTN, U2AF1, USH2A, and USH2A.

[0368] In any of the preceding embodiments and aspect, a gene, the sequence identifier (SEQ ID NO) for its NCBI Reference Sequence, a mutation or mutations therein, the intron or introns that are associated with diseases, and/or the exon or exons that are associated with diseases which can be treated by the method is selected from the list Table 2.

[0369] In any of the preceding embodiments and aspect, the disease or disorder is selected from Alport Syndrome, Alport Syndrome, Alport Syndrome, Alzheimer's disease, Amyotrophic lateral sclerosis (ALS), Autosomal dominant leukodystrophy (ADLD), Becker muscular dystrophy (BMD), Bethlem myopathy and Ullrich scleroatonic muscular dystrophy, Dilated cardiomyopathy (DCM), Duchenne muscular dystrophy, Dystrophic Epidermolysis Bullosa, Early-onset Parkinson disease (PD), Epidermolysis Bullosa (EB), Familial dysautonomia (FD), Familial partial lipodystrophy type 2 (FPLD2), Febrile seizures (FS); childhood absence epilepsy (CAE), generalized epilepsy with febrile seizures plus (GEFS+), and Dravet syndrome (DS)/severe myoclonic epilepsy in infancy (SMEI), Friedreich ataxia, Frontotemporal dementia with parkinsonism chromosome 17 (FTDP-17), Fuchs endothelial corneal dystrophy (FECD), Huntington's Disease, Hutchinson-Gilford progeria syndrome (HGPS), Junctional Epidermolysis Bullosa, Leber's congenital amaurosis (LCA), Limb girdle muscular dystrophy type 1B (LGMD1B), Limb-girdle muscular dystrophy 1G (LGMD1G), Microcephalic osteodysplastic primordial dwarfism type 1 (MOPD I), Myelodysplastic syndromes (MDS), Retinitis pigmentosa (adRP), Spinal muscular atrophy (SMA), Stargardt disease, Thrombotic thrombocytopenic purpura (TTP), Ushers syndrome type I, Ushers syndrome type II, Various myopathies and dystrophies, a wound, and X-linked parkinsonism with spasticity (XPDS).

[0370] In any of the preceding embodiments and aspect, a single administration of the effective amount of the synthetic RNA encoding the gene-editing protein causes persistent altered RNA splicing of the gene.

[0371] Aspects of the present invention are directed to modulating exon splicing, also referred to herein as “altering RNA splicing”.

[0372] In contrast to other methods, various embodiments of the present invention modify genomic DNA by introducing a single or double-stranded break in or near an exon to create a non-functional splice acceptor site in or near the exon or a non-functional splice donor site in an intron near the exon. In embodiments, “near an/the exon” means within about 1 kb or about 0.5 kb or about 0.1 kb of the exon. In some embodiments, the exon will be skipped during pre-mRNA processing. In some embodiments, the exon will be skipped without needing to be bound by an antisense oligonucleotide. Thus, in contrast to other methods, some embodiments of the present invention are effective following a single or a few administrations of RNA that express gene-editing proteins that target an exon. In some embodiments, the exon contains a mutation. In some embodiments, the mutation is a disease-causing mutation. In addition, a disease or disorder may be caused by protein splicing which produces a deleterious spliceform. Certain embodiments are therefore directed to produce an mRNA which lacks the exon that encodes a polypeptide sequence comprising a splice site. In certain embodiments, the resulting protein cannot form the deleterious spliceform.

[0373] Gene-editing proteins (and nucleic acids encoding gene-editing proteins) of the present invention may thus be used for altering RNA splicing for any genetic disorder that could be treated by exon skipping, e.g., Alport Syndrome, Alzheimer's disease, Bethlem myopathy and Ullrich scleroatonic muscular dystrophy, Duchenne muscular dystrophy, Dystrophic Epidermolysis Bullosa, Friedreich ataxia, Huntington's Disease, Junctional Epidermolysis Bullosa, Leber's congenital amaurosis (LCA), and various myopathies and dystrophies. The following table, Table 2, includes illustrative genes, mutations in the genes, introns, and exons that are associated with diseases which can be treated by modulating exon splicing, as disclosed herein.

TABLE 2

| | | | | SEQ ID | |
|---|---|---|---|---|---|
| | | | | NO: for | |
| | | | NCBI | the NCBI | Mutation/ |
| | | NCBI | Reference | Reference | relevant |
| Gene | Diseases | Gene ID | Sequence | Sequence | gene domain |
| ABCA4 | Stargardt | 24 | NG_009073.1 | 740 | (c.5461-10T > C); |
| | disease | | | | Exon 39 |
| ADAMTS-13 | Thrombotic | 11093 | NG_011934.2 | 741 | |
| | thrombocytopenic | | | | |
| | purpura (TTP) | | | | |
| APP | Alzheimer's | 351 | NG_007376.2 | 742 | exon 17 splicing |
| | disease | | | | which removes |
| | | | | | cleavage site |
| ATP6AP2 | X-linked | 10159 | NG_008874.1 | 743 | (c.345C > T); |
| | parkinsonism | | | | Exon 4 |
| | with spasticity | | | | |
| | (XPDS) | | | | |
| CEP290 | Leber's | 80184 | NG_008417.1 | 744 | Intron 26, |
| | congenital | | | | most common |
| | amaurosis (LCA) | | | | LCA-causing |
| | | | | | mutation |
| | | | | | results in a |
| | | | | | splice-donor |
| | | | | | in intron 26 |
| C0L17A1 | Junctional | 1308 | NG_007069.1 | 745 | |
| | Epidermolysis | | | | |
| | Bullosa | | | | |
| COL4A3 | Alport Syndrome | 1285 | NG_011591.1 | 746 | |
| COL4A4 | Alport Syndrome | 1286 | NG_011592.1 | 747 | |
| COL4A5 | Alport Syndrome | 1287 | NG_011977.2 | 748 | |
| COL6A1 | Bethlem | 1291 | NG_008674.1 | 749 | |
| | myopathy and | | | | |
| | Ullrich | | | | |
| | scleroatonic | | | | |
| | muscular | | | | |
| | dystrophy | | | | |
| COL6A2 | Bethlem | 1292 | NG_008675.1 | 750 | |
| | myopathy and | | | | |
| | Ullrich | | | | |
| | scleroatonic | | | | |
| | muscular | | | | |
| | dystrophy | | | | |
| COL6A3 | Bethlem | 1293 | NG_008676.1 | 751 | |
| | myopathy and | | | | |
| | Ullrich | | | | |
| | scleroatonic | | | | |
| | muscular | | | | |
| | dystrophy | | | | |
| COL7A1 | Dystrophic | 1294 | NG_007065.1 | 752 | |
| | Epidermolysis | | | | |
| | Bullosa | | | | |
| DMD | Duchenne | 1756 | NG_012232.1 | 753 | |
| | muscular | | | | |
| | dystrophy | | | | |
| DMD | Becker | 1756 | NG_012232.1 | 753 | (c.4250T > A); |
| | muscular | | | | Exon 31 |
| | dystrophy (BMD) | | | | |
| FUS | Amyotrophic | 2521 | NG_012889.2 | 755 | (c. 1566C > T), |
| | lateral | | | | (c. 1561T > G) |
| | sclerosis (ALS) | | | | |
| FXN | Friedreich | 2395 | NG_008845.2 | 756 | Intron 1 |
| | ataxia | | | | Target regions |
| | | | | | surround expanded |
| | | | | | GAA repeats |
| GABRG2 | Febrile | 2566 | NG_009290.1 | 757 | |
| | seizures (FS); | | | | |
| | childhood absence | | | | |
| | epilepsy (CAE), | | | | |
| | generalized | | | | |
| | epilepsy with | | | | |
| | febrile | | | | |
| | seizures plus | | | | |
| | (GEFS+), and | | | | |
| | Dravet syndrome | | | | |
| | (DS)/severe | | | | |
| | myoclonic epilepsy | | | | |
| | in infancy (SMEI) | | | | |
| HNRPDL | Limb-girdle | 9987 | NG_029681.1 | 758 | (c. 1667G > A), |
| | muscular | | | | (c.1667G > C) |
| | dystrophy 1G | | | | |
| | (LGMD1G) | | | | |
| HTT | Huntington's | 3064 | NG_009378.1 | 759 | exon 12 splicing - |
| | Disease | | | | Removal of exon 12 |
| | | | | | inhibits caspase-6 |
| | | | | | cleavage of HTT, |
| | | | | | reducing toxicity |
| IKBKAP | Familial | 8518 | NG_008788.1 | 760 | (c.2204 + 6T > C); |
| | dysautonomia | | | | Exon 20 |
| | (FD) | | | | |
| ITGA6 | Junctional | 3694 | NG_042041.1 | 761 | |
| | Epidermolysis | | | | |
| | Bullosa | | | | |
| ITGB4 | Junctional | 3691 | NG_007372.1 | 762 | |
| | Epidermolysis | | | | |
| | Bullosa | | | | |
| LAMA3 | Junctional | 3909 | NG_007853.2 | 763 | |
| | Epidermolysis | | | | |
| | Bullosa | | | | |
| LAMB3 | Junctional | 3914 | NG_007116.1 | 764 | |
| | Epidermolysis | | | | |
| | Bullosa | | | | |
| LAMC2 | Junctional | 3918 | NG_007079.2 | 765 | |
| | Epidermolysis | | | | |
| | Bullosa | | | | |
| LMNA | Dilated | 4000 | NG_008692.2 | 766 | (c.640-10A > G); |
| | cardiomyopathy | | | | Exon 4 |
| | (DCM) | | | | |
| LMNA | Familial partial | 4000 | NG_008692.2 | 766 | (c.1488 + 5G > C); |
| | lipodystrophy | | | | Intron 8 |
| | type 2 (FPLD2) | | | | |
| LMNA | Hutchinson- | 4000 | NG_008692.2 | 766 | (c.1824C > T); |
| | Gilford progeria | | | | Exon 11 |
| | syndrome (HGPS) | | | | |
| LMNA | Limb girdle | 4000 | NG_008692.2 | 766 | (c.1608 + 5G > C); |
| | muscular dystrophy | | | | Intron 9 |
| | type 1B (LGMD1B) | | | | |
| LMNB1 | Autosomal | 4001 | NG_008360.2 | 770 | |
| | dominant | | | | |
| | leukodystrophy | | | | |
| | (ADLD) | | | | |
| MAPT | Frontotemporal | 4137 | NG_007398 | 771 | (c.892A > G); |
| | dementia with | | | | Exon 10 |
| | parkinsonism | | | | |
| | chromosome 17 | | | | |
| | (FTDP-17) | | | | |
| PINK1 | Early-onset | 65018 | NG_008164.1 | 772 | (c.1488 + 1G > A); |
| | Parkinson | | | | Exon 7 |
| | disease (PD) | | | | |
| PRPF6 | Retinitis | 24148 | NG_029719.1 | 773 | (c.2185C > T) |
| | pigmentosa (adRP) | | | | |
| RBM20 | Dilated | 282996 | NG_021177.1 | 774 | (c.1962T > G) |
| | cardiomyopathy | | | | |
| | (DCM) | | | | |
| RNU4ATAC | Microcephalic | 100151683 | NG_029832.1 | 775 | (g.30G > A), |
| | osteodysplastic | | | | (g.50G > A), |
| | primordial | | | | (g.50G > C), |
| | dwarfism type 1 | | | | (g.51G > A), |
| | (MOPD I) | | | | (g.53C > G), |
| | | | | | (g.55G > A), |
| | | | | | (g.111G > A) |
| SMN1 | Spinal muscular | 6606 | NG_008691.1 | 776 | (c.922 + 6T/G) |
| | atrophy (SMA) | | | | |
| SNRNP200 | Retinitis | 23020 | NG_016973.1 | 777 | (c.3260C > T), |
| | pigmentosa (adRP) | | | | (c.3269G > T) |
| TARDP | Amyotrophic | 23435 | NG_008734.1 | 778 | (c.991C > A), |
| | lateral sclerosis | | | | (c.1009A > G) |
| | (ALS) | | | | |
| TCF4 | Fuchs endothelial | 6925 | NG_011716.2 | 779 | |
| | corneal dystrophy | | | | |
| | (FECD) | | | | |
| TTN | Various myopathies | 7273 | NG_011618.3 | 780 | |
| | and dystrophies | | | | |
| U2AF1 | Myelodysplastic | 7307 | NG_029455.1 | 781 | (c.101G > A) |
| | syndromes (MDS) | | | | |
| USH2A | Ushers | 7399 | NG_009497.1 | 782 | Exon 13 |
| | syndrome type I | | | | |
| USH2A | Ushers | 7399 | NG_009497.1 | 782 | PE40 |
| | syndrome type II | | | | (cryptic exon) |

| | | | Exons | | |
|---|---|---|---|---|---|
| | | Exons | amenable | | |
| | | amenable | to single | Exons | Exons |
| | | to single | target site | amenable | amenable |
| | | target site | treatment | to double | to triple |
| | | treatment | correction | target site | target site |
| | | to estore | of frameshift | treatment of | treatment of |
| | | reading | or premature | frameshift or | frameshift or |
| | | frame | stop codon | PSC within | PSC within |
| | | outside of | (PSC) within | one or more | one or more |
| Gene | Diseases | the exon | the exon | exons | exons |
| ABCA4 | Stargardt | | | | |
| | disease | | | | |
| ADAMTS-13 | Thrombotic | | | | |
| | thrombocytopenic | | | | |
| | purpura (TTP) | | | | |
| APP | Alzheimer's | | | | |
| | disease | | | | |
| ATP6AP2 | X-linked | | | | |
| | parkinsonism | | | | |
| | with spasticity | | | | |
| | (XPDS) | | | | |
| CEP290 | Leber's | | | | |
| | congenital | | | | |
| | amaurosis (LCA) | | | | |
| COL17A1 | Junctional | | 2, 3, 4, 5, 6, 7, | | |
| | Epidermolysis | | 8, 9, 10, 11, 12, | | |
| | Bullosa | | 13, 14, 15, 16, 17, | | |
| | | | 18, 19, 20, 21, 22, | | |
| | | | 23, 24, 25, 26, 27, | | |
| | | | 28, 29, 30, 31, 32, | | |
| | | | 33, 34, 35, 36, 37, | | |
| | | | 38, 39, 40, 41, 42, | | |
| | | | 43, 44, 45, 46, 47, | | |
| | | | 48, 49, 50, 51, 52, | | |
| | | | 53, 54, 55 | | |
| COL4A3 | Alport Syndrome | 19, 24, 26, 29, 30, | 2, 3, 4, 5, 6, 7, | (24; 26), (29; 30), | (24; 25; 26) |
| | | 37, 38, 43, 44, 49, | 8, 9, 10, 11, 12, | (37; 38), (43; 44), | |
| | | 50, 51 | 13, 14, 15, 16, 17, | (50; 51), (51; 52) | |
| | | | 18, 20, 21, 22, 23, | | |
| | | | 25, 27, 28, 31, 32, | | |
| | | | 33, 34, 35, 36, 39, | | |
| | | | 40, 41, 42, 45, 46, | | |
| | | | 47, 48 | | |
| COL4A4 | Alport Syndrome | 2, 3, 18, 22, 23, | 4, 5, 6, 7, 8, 9, | (22; 23), (23; 24), | |
| | | 24, 25, 33, 34, 47 | 10, 11, 12, 13, 14, | (24; 25), (33; 34) | |
| | | | 15, 16, 17, 19, 20, | | |
| | | | 21, 26, 27, 28, 29, | | |
| | | | 30, 31, 32, 35,36, | | |
| | | | 37, 38, 39, 40, 41, | | |
| | | | 42, 43, 44, 45, 46 | | |
| COL4A5 | Alport Syndrome | 19, 23, 25, 28, 29, | 2, 3, 4, 5, 6, 7, | (23; 25), (28; 29), | (23; 24; 25) |
| | | 36, 37, 44, 45, 50, | 8, 9, 10, 11, 12, | (36; 37), (44; 45), | |
| | | 51, 52 | 13, 14, 15, 16, 17, | (51; 52), (52; 53) | |
| | | | 18, 20, 21, 22, 24, | | |
| | | | 26, 27, 30, 31, 32, | | |
| | | | 33, 34, 35, 38, 39, | | |
| | | | 40, 41, 42, 43, 46, | | |
| | | | 47, 48, 49 | | |
| COL6A1 | Bethlem | 2, 4, 28, 30, 31, | 3, 5, 6, 7, 8, 9, | (28; 30), (31; 32) | (28; 29; 30) |
| | myopathy and | 32, 33 | 10, 11, 12, 13, 14, | | |
| | Ullrich | | 15, 16, 17, 18, 19, | | |
| | scleroatonic | | 20, 21, 22, 23, 24, | | |
| | muscular | | 25, 26, 27, 29, 34 | | |
| | dystrophy | | | | |
| COL6A2 | Bethlem | 2, 3, 24 | 4, 5, 6, 7, 8, 9, | (2; 3) | |
| | myopathy and | | 10, 11, 12, 13, 14, | | |
| | Ullrich | | 15, 16, 17, 18, 19, | | |
| | scleroatonic | | 20, 21, 22, 23, 25, | | |
| | muscular | | 26, 27 | | |
| | dystrophy | | | | |
| COL6A3 | Bethlem | 2, 12, 13, 14, 34, | 3, 4, 5, 6, 7, 8, | (12; 13), (13; 14), | (34; 35; 36) |
| | myopathy and | 36, 37, 39, 40 | 9, 10, 11, 15, 16, | (34; 36), (36; 37), | |
| | Ullrich | | 17, 18, 19, 20, 21, | (39; 40) | |
| | scleroatonic | | 22, 23, 24, 25, 26, | | |
| | muscular | | 27, 28, 29, 30, 31, | | |
| | dystrophy | | 32, 33, 35, 38, 41, | | |
| | | | 42, 43 | | |
| COL7A1 | Dystrophic | 2, 3, 4, 6, 7, 24, | 5, 8, 9, 10, 11, 12, | (4; 6), (6; 7), | (2; 3; 4), (4; 5; 6), |
| | Epidermolysis | 25, 27, 113 | 13, 14, 15, 16, 17, | (24; 25), (25; 27) | (25; 26; 27) |
| | Bullosa | | 18, 19, 20, 21, 22, | | |
| | | | 23, 26, 28, 29, 30, | | |
| | | | 31, 32, 33, 34, 35, | | |
| | | | 36, 37, 38, 39, 40, | | |
| | | | 41, 42, 43, 44, 45, | | |
| | | | 46, 47, 48, 49, 50, | | |
| | | | 51, 52, 53, 54, 55, | | |
| | | | 56, 57, 58, 59, 60, | | |
| | | | 61, 62, 63, 64, 65, | | |
| | | | 66, 67, 68, 69, 70, | | |
| | | | 71, 72, 73, 74, 75, | | |
| | | | 76, 77, 78, 79, 80, | | |
| | | | 81, 82, 83, 84, 85, | | |
| | | | 86, 87, 88, 89, 90, | | |
| | | | 91, 92, 93, 94, 95, | | |
| | | | 96, 97, 98, 99, 100, | | |
| | | | 101, 102, 103, 104, | | |
| | | | 105, 106, 107, 108, | | |
| | | | 109, 110, 111, 112, | | |
| | | | 114, 115, 116, 117 | | |
| DMD | Duchenne | 2, 6, 7, 8, 11, 12, | 3, 4, 5, 9, 10, 13, | (11; 12), (17; 18), | (6; 7; 8), |
| | muscular | 17, 18, 19, 20, 21, | 14, 15, 16, 23, 24, | (19; 20), (20; 21), | (59; 60; 61), |
| | dystrophy | 22, 43, 44, 45, 46, | 25, 26, 27, 28, 29, | (21; 22), (43; 44), | (63; 64; 65), |
| | | 50, 51, 52, 53, 54, | 30, 31, 32, 33, 34, | (44; 45), (45; 46), | (66; 67; 68), |
| | | 55, 56, 57, 58, 59, | 35, 36, 37, 38, 39, | (50; 51), (51; 52), | (76; 77; 78) |
| | | 61, 62, 63, 65, 66, | 40, 41, 42, 47, 48, | (52; 53), (54; 55), | |
| | | 67, 68, 69, 70, 75, | 49, 60, 64, 71, 72, | (55; 56), (56; 57), | |
| | | 76, 78 | 73, 74, 77 | (58; 59), (59; 61), | |
| | | | | (62; 63), (63; 65), | |
| | | | | (65; 66), (68; 69), | |
| | | | | (69; 70), (76; 78) | |
| DMD | Becker | | | | |
| | muscular | | | | |
| | dystrophy (BMD) | | | | |
| FUS | Amyotrophic | | | | |
| | lateral | | | | |
| | sclerosis (ALS) | | | | |
| FXN | Friedreich | | | | |
| | ataxia | | | | |
| GABRG2 | Febrile | | | | |
| | seizures (FS); | | | | |
| | childhood absence | | | | |
| | epilepsy (CAE), | | | | |
| | generalized | | | | |
| | epilepsy with | | | | |
| | febrile | | | | |
| | seizures plus | | | | |
| | (GEFS+), and | | | | |
| | Dravet syndrome | | | | |
| | (DS)/severe | | | | |
| | myoclonic epilepsy | | | | |
| | in infancy (SMEI) | | | | |
| HNRPDL | Limb-girdle | | | | |
| | muscular | | | | |
| | dystrophy 1G | | | | |
| | (LGMD1G) | | | | |
| HTT | Huntington's | | | | |
| | Disease | | | | |
| IKBKAP | Familial | | | | |
| | dysautonomia | | | | |
| | (FD) | | | | |
| ITGA6 | Junctional | 2, 3, 4, 5, 10, 11, | 6, 7, 8, 9, 13 | (2; 3), (11; 12) | (3; 4; 5) |
| | Epidermolysis | 12, 14 | | | |
| | Bullosa | | | | |
| ITGB4 | Junctional | 2, 3, 5, 6, 7, 12, | 4, 8, 9, 10, 11, | (3; 5), (14; 16), | (3; 4; 5), (5; 6; 7), |
| | Epidermolysis | 13, 14, 16, 18, 19, | 15, 17, 20, 23, 25, | (16; 18), (18; 19), | (12; 13; 14), |
| | Bullosa | 21, 22, 24, 26, 27, | 30, 31, 32, 33, 34, | (19; 21), (26; 27), | (14; 15; 16), |
| | | 28, 29 | 35, 36, 37, 38, 39 | (27; 28), (28; 29) | (16; 17; 18), |
| | | | | | (19; 20; 21) |
| LAMA3 | Junctional | 3, 4, 6, 7, 8, 9, | 2, 5, 10, 11, 12, | (3; 4), (8; 9), | (6; 7; 8), |
| | Epidermolysis | 14, 15, 16, 17, 18, | 13, 34, 35, 36, 37, | (14; 15), (15; 16), | (17; 18; 19), |
| | Bullosa | 19, 20, 21, 22, 23, | 38, 39, 41, 43, 45, | (16; 17), (20; 21), | (18; 19; 20), |
| | | 24, 25, 26, 27, 28, | 47, 49, 53, 54, 56, | (22; 23), (23; 24), | (29; 30; 31), |
| | | 29, 30, 31, 32, 33, | 61, 64, 66, 70, 74 | (24; 25), (25; 26), | (44; 45; 46), |
| | | 40, 42, 44, 46, 48, | | (26; 27), (28; 29), | (46; 47; 48), |
| | | 50, 51, 52, 55, 57, | | (31; 32), (44; 46), | (60; 61; 62), |
| | | 58, 59, 60, 62, 63, | | (46; 48), (50; 51), | (63; 64; 65), |
| | | 65, 67, 68, 69, 71, | | (57; 58), (58; 59), | (65; 66; 67) |
| | | 72, 73 | | (59; 60), (60; 62), | |
| | | | | (62; 63), (63; 65), | |
| | | | | (65; 67), (67; 68), | |
| | | | | (68; 69), (71; 72), | |
| | | | | (72; 73) | |
| LAMB3 | Junctional | 2, 3, 4, 5, 7, 8, | 6, 10, 11, 17, 21 | (3; 4), (4; 5), | (5; 6; 7), |
| | Epidermolysis | 9, 12, 13, 14, 15, | | (5; 7), (7; 8), | (16; 17; 18), |
| | Bullosa | 16, 18, 19, 20, 22 | | (8; 9), (12; 13), | (18; 19; 20) |
| | | | | (14; 15), (16; 18) | |
| LAMC2 | Junctional | 2, 3, 4, 6, 8, 10, | 5, 7, 9, 12, 13, 14, | (4; 6), (6; 8), | (2; 3; 4), (4; 5; 6), |
| | Epidermolysis | 11, 15, 16, 17, 18, | 21, 23, 26 | (8; 10), (10; 11), | (6; 7; 8), (8; 9; |
| | Bullosa | 19, 20, 22, 24, 25, | | (15; 16), (17; 18), | 10), (20; 21; 22), |
| | | 27 | | (18; 19), (20; 22), | (25; 26; 27) |
| | | | | (24; 25), (25; 27), | |
| | | | | (27; 28) | |
| LMNA | Dilated | | | | |
| | cardiomyopathy | | | | |
| | (DCM) | | | | |
| LMNA | Familial partial | | | | |
| | lipodystrophy | | | | |
| | type 2 (FPLD2) | | | | |
| LMNA | Hutchinson- | | | | |
| | Gilford progeria | | | | |
| | syndrome (HGPS) | | | | |
| LMNA | Limb girdle | | | | |
| | muscular dystrophy | | | | |
| | type 1B (LGMD1B) | | | | |
| LMNB1 | Autosomal | | | | |
| | dominant | | | | |
| | leukodystrophy | | | | |
| | (ADLD) | | | | |
| MAPT | Frontotemporal | | | | |
| | dementia with | | | | |
| | parkinsonism | | | | |
| | chromosome 17 | | | | |
| | (FTDP-17) | | | | |
| PINK1 | Early-onset | | | | |
| | Parkinson | | | | |
| | disease (PD) | | | | |
| PRPF6 | Retinitis | | | | |
| | pigmentosa (adRP) | | | | |
| RBM20 | Dilated | | | | |
| | cardiomyopathy | | | | |
| | (DCM) | | | | |
| RNU4ATAC | Microcephalic | | | | |
| | osteodysplastic | | | | |
| | primordial | | | | |
| | dwarfism type 1 | | | | |
| | (MOPD I) | | | | |
| SMN1 | Spinal muscular | | | | |
| | atrophy (SMA) | | | | |
| SNRNP200 | Retinitis | | | | |
| | pigmentosa (adRP) | | | | |
| TARDP | Amyotrophic | | | | |
| | lateral sclerosis | | | | |
| | (ALS) | | | | |
| TCF4 | Fuchs endothelial | | | | |
| | corneal dystrophy | | | | |
| | (FECD) | | | | |
| TTN | Various myopathies | 2, 5, 6, 7, 18, 19, | 3, 4, 8, 9, 10, 11, | (6; 7), (19; 21), | (19; 20; 21), (25; |
| | and dystrophies | 21, 22, 24, 25, 27, | 12, 13, 14, 15, 16, | (25; 27), (27; 28), | 26; 27), (39; 40; 41), |
| | | 28, 39, 40, 41, | 17, 20, 23, 26, 29, | (228; 229), (233; | (241; 242; 243), |
| | | 102, 103, 105, 228, | 30, 31, 32, 33, 34, | 234), (238; 239), | (255; 256; 257), |
| | | 229, 233, 234, 238, | 35, 36, 37, 38, 42, | (239; 240), (240; | (282; 283; 284), |
| | | 239, 240, 241, 243, | 43, 44, 45, 46, 47, | 241), (241; 243), | (284; 285; 286), |
| | | 244, 248, 249, 254, | 48, 49, 50, 51, 52, | (243; 244), (248; | (361; 362; 363) |
| | | 255, 257, 258, 259, | 53, 54, 55, 56, 57, | 249), (254; 255), | |
| | | 260, 263, 264, 267, | 58, 59, 60, 61, 62, | (255; 257), (257; | |
| | | 268, 281, 282, 284, | 63, 64, 65, 66, 67, | 258), (259; 260), | |
| | | 286, 292, 293, 358, | 68, 69, 70, 71, 72, | (263; 264), (267; | |
| | | 359, 360, 361 | 73, 74, 75, 76, 77, | 268), (281; 282), | |
| | | | 78, 79, 80, 81, 82, | (282; 284), (284; | |
| | | | 83, 84, 85, 86, 87, | 286), (292; 293), | |
| | | | 88, 89, 90, 91, 92, | (358; 359), (359; | |
| | | | 93, 94, 95, 96, 97, | 360), (360; 361), | |
| | | | 98, 99, 100, 101, | (361; 363) | |
| | | | 104, 106, 107, 108, | | |
| | | | 109, 110, 111, 112, | | |
| | | | 113, 114, 115, 116, | | |
| | | | 117, 118, 119, 120, | | |
| | | | 121, 122, 123, 124, | | |
| | | | 125, 126, 127, 128, | | |
| | | | 129, 130, 131, 132, | | |
| | | | 133, 134, 135, 136, | | |
| | | | 137, 138, 139, 140, | | |
| | | | 141, 142, 143, 144, | | |
| | | | 145, 146, 147, 148, | | |
| | | | 149, 150, 151, 152, | | |
| | | | 153, 154, 155, 156, | | |
| | | | 157, 158, 159, 160, | | |
| | | | 161, 162, 163, 164, | | |
| | | | 165, 166, 167, 168, | | |
| | | | 169, 170, 171, 172, | | |
| | | | 173, 174, 175, 176, | | |
| | | | 177, 178, 179, 180, | | |
| | | | 181, 182, 183, 184, | | |
| | | | 185, 186, 187, 188, | | |
| | | | 189, 190, 191, 192, | | |
| | | | 193, 194, 195, 196, | | |
| | | | 197, 198, 199, 200, | | |
| | | | 201, 202, 203, 204, | | |
| | | | 205, 206, 207, 208, | | |
| | | | 209, 210, 211, 212, | | |
| | | | 213, 214, 215, 216, | | |
| | | | 217, 218, 219, 220, | | |
| | | | 221, 222, 223, 224, | | |
| | | | 225, 226, 227, 230, | | |
| | | | 231, 232, 235, 236, | | |
| | | | 237, 242, 245, 246, | | |
| | | | 247, 250, 251, 252, | | |
| | | | 253, 256, 261, 262, | | |
| | | | 265, 266, 269, 270, | | |
| | | | 271, 272, 273, 274, | | |
| | | | 275, 276, 277, 278, | | |
| | | | 279, 280, 283, 285, | | |
| | | | 287, 288, 289, 290, | | |
| | | | 291, 294, 295, 296, | | |
| | | | 297, 298, 299, 300, | | |
| | | | 301, 302, 303, 304, | | |
| | | | 305, 306, 307, 308, | | |
| | | | 309, 310, 311, 312, | | |
| | | | 313, 314, 315, 316, | | |
| | | | 317, 318, 319, 320, | | |
| | | | 321, 322, 323, 324, | | |
| | | | 325, 326, 327, 328, | | |
| | | | 329, 330, 331, 332, | | |
| | | | 333, 334, 335, 336, | | |
| | | | 337, 338, 339, 340, | | |
| | | | 341, 342, 343, 344, | | |
| | | | 345, 346, 347, 348, | | |
| | | | 349, 350, 351, 352, | | |
| | | | 353, 354, 355, 356, | | |
| | | | 357, 362 | | |
| U2AF1 | Myelodysplastic | | | | |
| | syndromes (MDS) | | | | |
| USH2A | Ushers | | | | |
| | syndrome type I | | | | |
| USH2A | Ushers | | | | |
| | syndrome type II | | | | |

The data relevant and presently published with respect to the NCBI Gene ID and NCBI Reference Sequence listed in the table above are hereby incorporated by reference in their entireties.

[0374] In various embodiments, the present compositions alter RNA splicing of exons associated with a disease or disorder. In various embodiments, the disease or disorder is selected from Alport Syndrome, Alzheimer's disease, Amyotrophic lateral sclerosis (ALS), Autosomal dominant leukodystrophy (ADLD), Becker muscular dystrophy (BMD), Bethlem myopathy and Ullrich scleroatonic muscular dystrophy, Dilated cardiomyopathy (DCM), Duchenne muscular dystrophy, Dystrophic Epidermolysis Bullosa, Early-onset Parkinson disease (PD), Familial dysautonomia (FD), Familial partial lipodystrophy type 2 (FPLD2), Febrile seizures (FS); childhood absence epilepsy (CAE), generalized epilepsy with febrile seizures plus (GEFS+), and Dravet syndrome (DS)/severe myoclonic epilepsy in infancy (SMEI), Friedreich ataxia, Frontotemporal dementia with parkinsonism chromosome 17 (FTDP-17), Fuchs endothelial corneal dystrophy (FECD), Huntington's Disease, Hutchinson-Gilford progeria syndrome (HGPS), Junctional Epidermolysis Bullosa, Leber's congenital amaurosis (LCA), Limb girdle muscular dystrophy type 1B (LGMD1B), Limb-girdle muscular dystrophy 1G (LGMD1G), Microcephalic osteodysplastic primordial dwarfism type 1 (MOPD I), Myelodysplastic syndromes (MDS), Retinitis pigmentosa (adRP), Spinal muscular atrophy (SMA), Stargardt disease, Thrombotic thrombocytopenic purpura (TTP), Ushers syndrome type I, Ushers syndrome type II, X-linked parkinsonism with spasticity (XPDS), and Various myopathies and dystrophies.

[0375] Treating Diseases, Disorders, or Injuries of the Central Nervous System (CNS)

[0376] In various embodiments, the present methods and compositions find use in methods of treating, preventing, or ameliorating a disease, disorder, and/or condition. For instance, in some embodiments, the described methods of in vivo delivery, including various effective doses, administration strategies, and formulations are used in a method of treatment.

[0377] An aspect of the present invention is a method for treating a neurodegenerative disease or central nervous system injury comprising administering to a subject in need thereof a synthetic RNA encoding a neurotrophic agent, a gene-editing protein, or an enzyme that cleaves a dysfunctional, an abnormally folding, and/or a disease-causing protein, wherein the neurotrophic agent, the gene-editing protein, or the enzyme treats the neurodegenerative disease or central nervous system injury.

[0378] In embodiments, the neurodegenerative disease is selected from: a motor neuron disease, a polyglutamine disease, a prion disease, a spinocerebellar ataxia, a trinucleotide repeat disorder, Alzheimer's disease, amyotrophic lateral sclerosis (ALS), ataxia telangiectasia, ataxia-oculomotor apraxia, Batten disease, Cockayne syndrome, dementia, familial encephalopathy, Huntington's disease, Lewy-body dementia, multiple system atrophy, Parkinson's disease, spinocerebellar ataxia type 1, spongiform encephalopathy, and xeroderma pigmentosum.

[0379] In embodiments, the central nervous system injury is selected from: concussion, diffuse axonal injury, diffuse brain injury, focal brain injury, hemorrhage, seizure, stroke, traumatic brain injury, traumatic encephalopathy, and traumatic head injury.

[0380] In any of the preceding embodiments and aspects, wherein the administering is by intravenous injection or infusion; intra-arterial injection or infusion; intrathecal injection or infusion; intracerebral injection or infusion; injection or infusion into a ventricle, including a lateral ventricle; injection or infusion into the hippocampus; injection or infusion into the striatum; or injection or infusion into one or more of: the putamen, the caudate nucleus, the substantia nigra, the cortex, the third ventricle, the spinal cord, or the basal ganglia.

[0381] In any of the preceding embodiments and aspects, wherein the synthetic RNA encodes a neurotrophic agent.

[0382] In embodiments, the neurotrophic agent is a neurotrophic protein selected from nerve growth factor (NGF), brain-derived neurotrophic factor (BDNF), neurotrophin-3 (NT-3), neurotrophin-4 (NT-4), the GDNF family of ligands, and ciliary neurotrophic factor (CNTF).

[0383] In embodiments, the neurotrophic protein is NGF and comprising the sequence of SEQ ID NO: 254, the neurotrophic protein is BDNF and comprising the sequence of SEQ ID NO: 561, the neurotrophic protein is NT-3 and comprising the sequence of SEQ ID NO: 255, the neurotrophic protein is NT-4 and comprising the sequence of SEQ ID NO: 256, the neurotrophic protein is CNTF and comprising the sequence of SEQ ID NO: 786, or the neurotrophic protein is GDNF family of ligands and comprising the sequence of SEQ ID NO: 787-793.

[0384] In embodiments, the synthetic RNA encodes a gene-editing protein that targets a safe harbor locus.

[0385] In embodiments, the synthetic RNA encodes a gene-editing protein that targets one or more of: AAVS1, CCR5, the human orthologue of the mouse Rosa26 locus.

[0386] In embodiments, the gene-editing protein inserts a functional copy of a gene into the subject's cells.

[0387] In embodiments, the inserted functional copy of a gene does not cause alterations of the subject's cell's genome which pose a risk to the subject.

[0388] In embodiments, the gene encodes a neurotrophic agent.

[0389] In any of the preceding embodiments and aspects, the gene encodes nerve growth factor (NGF), brain-derived neurotrophic factor (BDNF), neurotrophin-3 (NT-3), neurotrophin-4 (NT-4), the GDNF family of ligands, and ciliary neurotrophic factor (CNTF).

[0390] In embodiments, the NGF comprises the sequence of SEQ ID NO: 254, the BDNF comprises the sequence of SEQ ID NO: 561, the NT-3 comprises the sequence of SEQ ID NO: 255, the NT-4 comprises the sequence of SEQ ID NO: 256, the CNTF comprises the sequence of SEQ ID NO: 786, or the GDNF family of ligands comprises the sequence of SEQ ID NO: 787-793.

[0391] In any of the preceding embodiments and aspects, the gene is inserted downstream of one or more of: a simple promoter, a constitutive promoter, a strong promoter, an endogenous promoter, tissue-specific promoter, cell type-specific promoter, or a drug-inducible promoter.

[0392] In any of the preceding embodiments and aspects, the method induces neurogenesis.

[0393] In any of the preceding embodiments and aspects, the synthetic RNA encodes an enzyme that cleaves a dysfunctional, abnormally folding, and/or a disease-causing protein.

[0394] In embodiments, the dysfunctional, abnormally folding, and/or disease-causing protein forms a glial scar.

[0395] In any of the preceding embodiments and aspects, the dysfunctional, abnormally folding, and/or disease-causing protein is amyloid, tau, alpha-synuclein, or huntingtin.

[0396] In any of the preceding embodiments and aspects, the administering is by intravenous injection or infusion; intra-arterial injection or infusion; intrathecal injection or infusion; intracerebral injection or infusion; injection or infusion into a ventricle, including a lateral ventricle; injection or infusion into the hippocampus; injection or infusion into the striatum; or injection or infusion into one or more of: the putamen, the caudate nucleus, the substantia nigra, the cortex, the third ventricle, the spinal cord, or the basal ganglia.

[0397] In any of the preceding embodiments and aspects, the administering is directly to a target tissue.

[0398] In embodiments, the administering is directly to a site of disease or injury.

[0399] In any of the preceding embodiments and aspects, the synthetic RNA is not encapsulated in a viral particle.

[0400] In any of the preceding embodiments and aspects, the synthetic RNA is formulated in a liposome or lipid particle.

[0401] In some aspects, the present invention relates to methods and compositions for treating a neurodegenerative disease or neural injury comprising delivering to a patient a synthetic RNA molecule. In various embodiments, the neurodegenerative disease is selected from Alzheimer's disease, Huntington's disease, Parkinson's disease, Lewy-body dementia, and dementia. In various embodiments, the neural injury is stroke. In various embodiments, the administering is by intrathecal injection or infusion, intracerebral injection, injection into a ventricle, including a lateral ventricle, injection into the hippocampus, injection into the striatum, or injection into one or more of the putamen, the caudate nucleus, the substantia nigra, the cortex, the third ventricle, the spinal cord, or the basal ganglia.

[0402] In various embodiments, the synthetic RNA molecule encodes a neurotrophic agent. In various embodiments, the neurotrophic agent is a neurotrophic protein. In various embodiments, the neurotrophic protein is selected from nerve growth factor (NGF), brain-derived neurotrophic factor (BDNF), neurotrophin-3 (NT-3), neurotrophin-4 (NT-4), the GDNF family of ligands, and ciliary neurotrophic factor (CNTF). In various embodiments, the neurotrophic protein is BDNF.

[0403] In various embodiments, the synthetic RNA molecule encodes a gene-editing protein that targets a safe harbor locus, wherein the safe harbor locus is capable of accommodating the integration of new genetic material such that the integrated inserted genetic elements function predictably and/or do not cause alterations of the host genome which pose a risk to the host cell or organism. In various embodiments, the method comprises inserting a functional copy of a gene into the patient's cells. In various embodiments, the gene encodes a neurotrophic agent. In various embodiments, the gene encodes nerve growth factor (NGF), brain-derived neurotrophic factor (BDNF), neurotrophin-3 (NT-3), neurotrophin-4 (NT-4), the GDNF family of ligands, and ciliary neurotrophic factor (CNTF). In various embodiments, the gene encodes BDNF. In various embodiments, the gene is inserted downstream of one or more of a simple promoter, a constitutive promoter, a strong promoter, an endogenous promoter, or a drug-inducible promoter. In various embodiments, the drug-inducible promoter is inducible by tetracycline, e.g., a Tet-On or Tet-Off promoter. In various embodiments, the drug-inducible promoter is inducible by doxycycline.

[0404] In various embodiments, the present methods and compositions target the Huntingtin (HTT) gene or DNA upstream or downstream of the HTT gene, e.g., for treating Huntington's disease.

[0405] In various embodiments, the composition or method induces neurogenesis.

[0406] In some aspects, the invention provides methods for obtaining protein expression in a desired tissue. The methods comprising in vivo administering to an animal a composition comprising an mRNA such that the mRNA contacts a cell, is uptaken by the cell, and is expressed by the cell in the desired tissue. The in vivo administering may be intravenous, intra-arterial, or directly to the desired tissue. In embodiments, the mRNA encodes a protein that is absent in the cell or is insufficiently produced by the cell, such that the cell is in or contributes to a disease state. In embodiments, the mRNA encodes a digestive enzyme that cleaves a dysfunctional protein, abnormally folding, and/or a disease-causing protein. In embodiments, the disease-causing protein forms a glial scar. In embodiments, the abnormally folding and/or disease-causing protein is tau, alpha-synuclein, or huntingtin. In embodiments, the mRNA encodes a gene-editing protein. In embodiments, the mRNA is not encapsulated in a viral particle and/or is formulated in a liposome.

[0407] Treatment of Pain

[0408] In various embodiments, the present compositions are used to treat and reduce pain, e.g., post-surgical pain or chronic pain.

[0409] An aspect of the present invention is a method for treating and/or reducing pain comprising administering to a subject in need thereof an effective amount of a synthetic RNA encoding a gene-editing protein capable of creating a single-strand or double-strand break in a voltage-gated sodium channel type 1 (NaV1) gene, wherein the administering is directed to the central nervous system (CNS) or the peripheral nervous system (PNS).

[0410] In embodiments, the NaV1 is selected from NaV1.3, NaV1.7, NaV1.8, and NaV1.9.

[0411] In embodiments, the NaV1.3 is encoded by the SCN3A gene comprising the sequence of SEQ ID NO: 671, the NaV1.7 is encoded by the SC9N9A gene comprising the sequence of SEQ ID NO: 662, the NaV1.8 is encoded by the SCN10A gene comprising the sequences of SEQ ID NO: 672, and the NaV1.9 is encoded by the SCN11A gene comprising the sequences of SEQ ID NO: 673.

[0412] In any of the preceding embodiments and aspects, the administering is directed to neurons and/or glial cells of the CNS or PNS.

[0413] In any of the preceding embodiments and aspects, the administering is by intraganglionic injection, injection to the peripheral or central nerve roots, or injection in proximity to the dorsal root ganglion or nerve root.

[0414] In any of the preceding embodiments and aspects, the administering is directed into the parenchyma or the cerebrospinal spinal fluid of the central nervous system.

[0415] In any of the preceding embodiments and aspects, the synthetic RNA encoding a gene-editing protein is administered systemically and its penetrance to the CNS or PNS is increased by encapsulation in a viral or non-viral particle, by electrical stimulation, by acoustical stimulation, and/or by co-administration with a drug.

[0416] In any of the preceding embodiments and aspects, the RNA comprises or encodes a transport signal that directs the RNA or a protein product to a neuron's cell body or to a distal portion of the neuron.

[0417] In any of the preceding embodiments and aspects, the synthetic RNA encoding a gene-editing protein decreases expression of a wild-type or a mutant form of NaV 1.3, NaV 1.7, NaV 1.8, or NaV 1.9.

[0418] In any of the preceding embodiments and aspects, the synthetic RNA encoding a gene-editing protein increases expression of a wild-type or a mutant form of NaV 1.3, NaV 1.7, NaV 1.8, or NaV 1.9.

[0419] In any of the preceding embodiments and aspects, the synthetic RNA encoding a gene-editing protein increases enkephalins and/or glutamic acid decarboxylases in mesenchymal stem cells, thereby treating and/or reducing pain.

[0420] In any of the preceding embodiments and aspects, the methods further comprise administering electrical stimulation, a drug, and/or a cell therapy to increase efficacy.

[0421] In any of the preceding embodiments and aspects, the gene-editing protein is selected from a TALEN, a meganuclease, a nuclease, a zinc finger nuclease, a CRISPR-associated protein, CRISPR/Cas9, Cas9, xCas9, Cas12a (Cpf1), Cas13a, Cas14, CasX, CasY, a Class 1 Cas protein, a Class 2 Cas protein, and MAD7.

[0422] In any of the preceding embodiments and aspects, the gene-editing protein comprises: (a) a DNA-binding domain comprising a plurality of repeat sequences and at least one of the repeat sequences comprises the amino acid sequence: LTPvQWAIAwxyzGHGG (SEQ ID NO: 629), wherein: “v” is Q, D or E, “w” is S or N, “x” is H, N, or I, “y” is D, A, I, N, G, H, K, S, or null, and “z” is GGKQALETVQRLLPVLCQD (SEQ ID NO: 630) or GGKQALETVQRLLPVLCQA (SEQ ID NO: 631); and (b) a nuclease domain comprising a catalytic domain of a nuclease.

[0423] In embodiments, the nuclease domain is capable of forming a dimer with another nuclease domain.

[0424] In any of the preceding embodiments and aspects, the nuclease domain comprises the catalytic domain of a protein comprising the amino acid sequence of SEQ ID NO: 632.

[0425] In any of the preceding embodiments and aspects, at least one of the repeat sequences comprising the amino acid sequence LTPvQVVAIAwxyzGHGG (SEQ ID NO: 629) is between 36 and 39 amino acids long.

[0426] In any of the preceding embodiments and aspects, the pain is post-surgical and/or chronic pain.

[0427] In any of the preceding embodiments and aspects, the synthetic RNA comprises one or more non-canonical nucleotides.

[0428] In embodiments, the one or more non-canonical nucleotides avoids substantial cellular toxicity.

[0429] In any of the preceding embodiments and aspects, the non-canonical nucleotides have one or more substitutions at positions selected from the 2C, 4C, and 5C positions for a pyrimidine, or selected from the 6C, 7N and 8C positions for a purine.

[0430] In various embodiments, the present methods and compositions target any proteins associated with pain or treat or reduce pain, e.g., post-surgical pain and chronic pain. In various embodiments, the present invention targets the full-length and/or truncated forms of any of Voltage-gated Sodium channel type 1 (NaV1) proteins. As examples, NaV1.3 (encoded by SCN3A, SEQ ID NO: 671), NaV1.7 (encoded by SC9N9A, SEQ ID NO: 662), NaV1.8 (encoded by SCN10A, SEQ ID NO: 672), and NaV1.9 (encoded by SCN11A, SEQ ID NO: 673). In various embodiments, the present invention targets precursor forms and/or mature forms and/or isoforms of any of the NaV1 proteins disclosed herein.

[0431] Non-Standard Untranslated Regions (UTRs)

[0432] It has now been discovered that the inclusion of guanosine nucleotides within the tail can enhance stability and/or translation efficiency of a synthetic RNA molecule. Some embodiments are therefore directed to a synthetic RNA molecule comprising a tail, wherein the tail comprises adenosine nucleotides and one or more other nucleotides. Other embodiments are directed to a template that encodes a tail, wherein the tail comprises deoxyadenosine nucleotides and one or more other nucleotides. In one embodiment, the tail includes guanosine nucleotides. In another embodiment, the tail includes cytosine nucleotides. In a further embodiment, the tail includes uridine nucleotides. In a still further embodiment, the tail includes one or more chemically modified nucleotides and/or non-canonical nucleotides. In various embodiments, the other nucleotides are incorporated at regularly spaced intervals, or at random intervals, or in pairs or groups of adjacent nucleotides separated by one or more adenosine nucleotides. In one embodiment, the tail includes deoxyguanosine nucleotides. In another embodiment, the tail includes deoxycytosine nucleotides. In a further embodiment, the tail includes deoxyuridine nucleotides. In various embodiments, the other nucleotides are incorporated at regularly spaced intervals, or at random intervals, or in pairs or groups of adjacent nucleotides separated by one or more deoxyadenosine nucleotides.

[0433] An aspect of the present invention is a composition comprising a DNA template comprising: (a) a sequence encoding a protein, (b) a tail region comprising deoxyadenosine nucleotides and one or more other nucleotides, and (c) a restriction enzyme binding site.

[0434] In embodiments, the one or more other nucleotides comprises deoxyguanosine residues.

[0435] In embodiments, the tail region comprises about 1%, about 2%, about 5%, about 10%, about 15%, about 20%, about 25%, about 30%, about 35%, about 40%, about 45%, or about 50% deoxyguanosine residues.

[0436] In embodiments, the tail region comprises more than 50% deoxyguanosine residues.

[0437] In embodiments, the one or more other nucleotides comprises deoxycytidine residues.

[0438] In embodiments, the tail region comprises about 1%, about 2%, about 5%, about 10%, about 15%, about 20%, about 25%, about 30%, about 35%, about 40%, about 45%, or about 50% deoxycytidine residues.

[0439] In embodiments, the tail region comprises more than 50% deoxycytidine residues.

[0440] In embodiments, the one or more other nucleotides comprises deoxythymidine residues.

[0441] In embodiments, the tail region comprises about 1%, about 2%, about 5%, about 10%, about 15%, about 20%, about 25%, about 30%, about 35%, about 40%, about 45%, or about 50% deoxythymidine residues.

[0442] In embodiments, the tail region comprises more than 50% deoxythymidine residues.

[0443] In embodiments, the one or more other nucleotides comprise deoxyguanosine residues and deoxycytidine residues.

[0444] In any of the preceding embodiments and aspects, the tail region comprises about 99%, about 98%, about 95%, about 90%, about 85%, about 80%, about 75%, about 70%, about 65%, about 60%, about 55%, or about 50% deoxyadenosine residues.

[0445] In any of the preceding embodiments and aspects, the tail region comprises fewer than 50% deoxyadenosine residues.

[0446] In any of the preceding embodiments and aspects, the length of the tail region is between about 80 base pairs and about 120 base pairs, about 120 base pairs and about 160 base pairs, about 160 base pairs and about 200 base pairs, about 200 base pairs and about 240 base pairs, about 240 base pairs and about 280 base pairs, or about 280 base pairs and about 320 base pairs.

[0447] In any of the preceding embodiments and aspects, the length of the tail region is greater than 320 base pairs.

[0448] An aspect of the present invention is a composition comprising a synthetic RNA comprising: (a) a sequence encoding a protein, and (b) a tail region comprising adenosine nucleotides and one or more other nucleotides.

[0449] In embodiments, the one or more other nucleotides comprises guanosine residues.

[0450] In embodiments, the tail region comprises about 1%, about 2%, about 5%, about 10%, about 15%, about 20%, about 25%, about 30%, about 35%, about 40%, about 45%, or about 50% guanosine residues.

[0451] In embodiments, the tail region comprises more than 50% guanosine residues.

[0452] In embodiments, the one or more other nucleotides comprises cytidine residues.

[0453] In embodiments, the tail region comprises about 1%, about 2%, about 5%, about 10%, about 15%, about 20%, about 25%, about 30%, about 35%, about 40%, about 45%, or about 50% cytidine residues.

[0454] In embodiments, the tail region comprises more than 50% cytidine residues.

[0455] In embodiments, the one or more other nucleotides comprises uridine residues.

[0456] In embodiments, the tail region comprises about 1%, about 2%, about 5%, about 10%, about 15%, about 20%, about 25%, about 30%, about 35%, about 40%, about 45%, or about 50% uridine residues.

[0457] In embodiments, the tail region comprises more than 50% uridine residues.

[0458] In embodiments, the one or more other nucleotides comprise guanosine residues and cytidine residues.

[0459] In any of the preceding embodiments and aspects, the tail region comprises about 99%, about 98%, about 95%, about 90%, about 85%, about 80%, about 75%, about 70%, about 65%, about 60%, about 55%, or about 50% adenosine residues.

[0460] In any of the preceding embodiments and aspects, the tail region comprises fewer than 50% adenosine residues.

[0461] In any of the preceding embodiments and aspects, the length of the tail region is between about 80 nucleotides and about 120 nucleotides, about 120 nucleotides and about 160 nucleotides, about 160 nucleotides and about 200 nucleotides, about 200 nucleotides and about 240 nucleotides, about 240 nucleotides and about 280 nucleotides, or about 280 nucleotides and about 320 nucleotides.

[0462] In any of the preceding embodiments and aspects, the length of the tail region is greater than 320 nucleotides.

[0463] An aspect of the present invention is a composition comprising a synthetic RNA comprising a 3′-untranslated region sequence having at least 90% homology to the 3′-untranslated region of a gene selected from: APOBEC3H, CD52, DMC1, EIF3E, GPR160, and RPS24.

[0464] In any of the preceding embodiments and aspects, the synthetic RNA further comprises one or more non-canonical nucleotides.

[0465] In embodiments, the non-canonical nucleotides have one or more substitutions at positions selected from the 2C, 4C, and 5C positions for a pyrimidine, or selected from the 6C, 7N and 8C positions for a purine.

[0466] In any of the preceding embodiments and aspects, the non-canonical nucleotides comprise one or more of 5-hydroxycytidine, 5-methylcytidine, 5-hydroxymethylcytidine, 5-carboxycytidine, 5-formylcytidine, 5-methoxycytidine, pseudouridine, 5-hydroxyuridine, 5-methyluridine, 5-hydroxymethyluridine, 5-carboxyuridine, 5-formyluridine, 5-methoxyuridine, 5-hydroxypseudouridine, 5-methylpseudouridine, 5-hydroxymethylpseudouridine, 5-carboxypseudouridine, 5-formylpseudouridine, and 5-methoxypseudouridine, optionally at an amount of at least 50%, or at least 60%, or at least 70%, or at least 80%, or at least 90%, or 100% of the non-canonical nucleotides.

[0467] In any of the preceding embodiments and aspects, at least about 50% of cytidine residues are non-canonical nucleotides, and which are selected from 5-hydroxycytidine, 5-methylcytidine, 5-hydroxymethylcytidine, 5-carboxycytidine, 5-formylcytidine, and 5-methoxycytidine.

[0468] In any of the preceding embodiments and aspects, at least about 75% or at least about 90% of cytidine residues are non-canonical nucleotides, and the non-canonical nucleotides are selected from 5-hydroxycytidine, 5-methylcytidine, 5-hydroxymethylcytidine, 5-carboxycytidine, 5-formylcytidine, and 5-methoxycytidine.

[0469] In any of the preceding embodiments and aspects, at least about 20% of uridine, or at least about 40%, or at least about 50%, or at least about 75%, or at about least 90% of uridine residues are non-canonical nucleotides, and the non-canonical are selected from pseudouridine, 5-hydroxyuridine, 5-methyluridine, 5-hydroxymethyluridine, 5-carboxyuridine, 5-formyluridine, 5-methoxyuridine, 5-hydroxypseudouridine, 5-methylpseudouridine, 5-hydroxymethylpseudouridine, 5-carboxypseudouridine, 5-formylpseudouridine, and 5-methoxypseudouridine.

[0470] In any of the preceding embodiments and aspects, at least about 40%, or at least about 50%, or at least about 75%, or at about least 90% of uridine residues are non-canonical nucleotides, and the non-canonical nucleotides are selected from pseudouridine, 5-hydroxyuridine, 5-methyluridine, 5-hydroxymethyluridine, 5-carboxyuridine, 5-formyluridine, 5-methoxyuridine, 5-hydroxypseudouridine, 5-methylpseudouridine, 5-hydroxymethylpseudouridine, 5-carboxypseudouridine, 5-formylpseudouridine, and 5-methoxypseudouridine.

[0471] In any of the preceding embodiments and aspects, at least about 10% of guanine residues are non-canonical nucleotides, and the non-canonical nucleotide is optionally 7-deazaguanosine.

[0472] In any of the preceding embodiments and aspects, the synthetic RNA comprises no more than about 50% 7-deazaguanosine in place of guanosine residues.

[0473] In any of the preceding embodiments and aspects, the synthetic RNA does not comprise non-canonical nucleotides in place of adenosine residues.

[0474] In any of the preceding embodiments and aspects, the synthetic RNA comprises 5-methoxyuridine.

[0475] Certain embodiments are directed to a tail comprising no adenosine or deoxyadenosine nucleotides. In one embodiment, the tail is a poly(G) tail.

[0476] In certain embodiments, the tail comprises repeated sequences, wherein each repeated sequence comprises a poly(A) sequence followed by a nucleotide other than adenosine or deoxyadenosine. In some embodiments, the poly(A) tail comprises (A)₁₄G (SEQ ID NO: 710), or (A)₉G (SEQ ID NO: 711), or (A)₄G (SEQ ID NO: 712). In some embodiments, the tail comprises 10 repeats of (A)₁₄G (SEQ ID NO: 710), or 15 repeats of (A)₉G (SEQ ID NO: 711), or 30 repeats of (A)₄G (SEQ ID NO: 712). In other embodiments, the tail comprises (A)₁₃GG (SEQ ID NO: 713), or (A)₁₂GGG (SEQ ID NO: 714), or (A)₈GG (SEQ ID NO: 715), or (A)₇GGG (SEQ ID NO: 716), or (A)₃GG (SEQ ID NO: 717). In other embodiments, the tail comprises 10 repeats of (A)₁₃GG (SEQ ID NO: 713), or 10 repeats of (A)₁₂GGG (SEQ ID NO: 714), or 15 repeats of (A)₈GG (SEQ ID NO: 715), or 15 repeats of (A)₇GGG (SEQ ID NO: 716), or 30 repeats of (A)₃GG (SEQ ID NO: 717).

[0477] In other embodiments, the tail contains cytidine or uridine residues, or modified versions thereof, or non-canonical nucleotides.

[0478] In some embodiments, the tail comprises about 1%, or about 2%, or about 3%, or about 5%, or about 10%, or about 15%, or about 20%, or about 25%, or about 30%, or about 40%, or about 50%, or about 60%, or about 70%, or about 80%, or about 90%, or greater than about 90% nucleotides other than adenosine or deoxyadenosine, and/or modified and/or non-canonical nucleotides.

[0479] In some embodiments, the tail includes non-adenosine nucleotides or non-canonical nucleotides that are incorporated in an enzymatic reaction or a non-enzymatic reaction. In one embodiment, the reaction does not include a template. In another embodiment the enzyme is a non-canonical poly(A) polymerase. In a further embodiment, the enzyme is selected from TENT4A (PAPD7), TENT4B (PAPD5), TENT5A, TENT5B, TENT5C, and TENT5D. In other embodiments, the template is an RNA template, PNA template, LNA template, or a hybrid RNA/DNA template.

[0480] Other embodiments are directed to a method for analyzing the length of a tail, a template, or a synthetic RNA molecule comprising isolating isolate the tail or template, or some portion of the RNA or template inclusive of the tail, using restriction digestion. In various embodiments, the analysis is performed by gel electrophoresis, or by capillary electrophoresis, or by high-performance liquid chromatography (HPLC), or by mass spectrometry, or by size-exclusion chromatography (SEC), or by sequencing reactions, or by polymerase chain reactions (PCR), or by other biological, biochemical or biophysical methods.

[0481] In certain situations, bacteria or other organisms are used to amplify a plasmid or polynucleotide sequence comprising a template, the sequence of a synthetic RNA molecule, or both. It has now been discovered that the repetitive or homopolymeric nature of the tail may destabilize the plasmid or polynucleotide sequence during amplification and culture growth.

[0482] Some embodiments are therefore directed to a method of amplifying a template using modified or engineered bacteria expressing mutations that enhance the stability of repetitive or homopolymeric plasmids or polynucleotides. In one embodiment, the bacteria are Stable Competent E. coli (New England Biolabs). In another embodiment, the bacteria are teIN-expressing E. coli, and the teIN-expressing E. coli are transformed with a linear plasmid comprising the template. Still other embodiments are directed to methods for amplifying a template in yeast or other eukaryotes.

[0483] It has now been discovered that certain 3′-UTR sequences can modulate stability and translation efficiency of synthetic RNA molecules. Certain embodiments are therefore directed to a synthetic RNA molecule comprising a 3′-UTR sequence that confers stability. Other embodiments are directed to a 3′-UTR sequence that confers high efficiency translation. In one embodiment, the 3′-UTR is selected from APOBEC3H, CD52, DMC1, EIF3E, GPR160, and RPS24. In another embodiment, the synthetic RNA molecule encodes a protein of interest.

[0484] In one aspect, the synthetic RNA molecule has an effective dose lower than a synthetic RNA molecule having a 3′-UTR comprising an HBB sequence.

[0485] It has now been discovered that in certain situations, a synthetic RNA molecule having a short half-life can be beneficial, for example, in the case of expressing a gene-editing protein, to minimize off-target effects. Certain embodiments are therefore directed to a synthetic RNA molecule with a half-life shorter than about 24 hours, or about 18 hours, or about 12 hours, or about 9 hours, or about 6 hours, or about 3 hours, or about 2, or about 1 hour.

[0486] It has now been discovered that a synthetic RNA molecule comprising 3′-UTRs containing one or more microRNA binding sites can enable cell-type specific expression. Certain embodiments are therefore directed to a synthetic RNA molecule comprising a 3′-UTR containing one or microRNA binding sites. In one embodiment, the synthetic RNA molecule is preferentially expressed in stem cells, or erythrocytes, or leukocytes, or platelets, or neurons, or neuroglial cells, or myocytes, or chondrocytes, or osteoclasts, or osteoblasts, or osteocytes, or lining cells, or keratinocytes, or melanocytes, or Langerhans cells, or fibroblasts, or merkel cells, endothelial cells, or epithelial cells, or adipocytes, or gametes. In one embodiment, the synthetic RNA molecule is preferentially expressed in epithelial tissue, or connective tissue, or muscle tissue, or nervous tissue.

[0487] It has now been discovered that a synthetic RNA molecule comprising a 3′-UTR containing one or more transfection reagent binding sites can enable high efficiency transfection of cells.

[0488] It has now been discovered that a synthetic RNA molecule comprising a 3′-UTR containing one or more predefined sequence elements can enable controlled degradation, for example, by a sequence element that binds to a molecule that is administered to a patient to reduce the in vivo half-life of the synthetic RNA molecule.

[0489] Certain embodiments are directed to methods of making nucleic acid drugs, including RNA comprising one or more non-canonical nucleotides. Such methods yield substantially stable RNA.

[0490] In various embodiments, the present methods and compositions find use in methods of altering, modifying and/or changing a tissue (e.g. cosmetically).

[0491] Gene Editing for Treating Various Diseases/Indications

[0492] Several naturally occurring proteins contain DNA-binding domains that can recognize specific DNA sequences, for example, zinc fingers (ZFs) and transcription activator-like effectors (TALEs). Fusion proteins containing one or more of these DNA-binding domains and the cleavage domain of FokI endonuclease can be used to create a double-strand break in a desired region of DNA in a cell (see, e.g., US Patent Appl. Pub. No. US 2012/0064620, US Patent Appl. Pub. No. US 2011/0239315, U.S. Pat. No. 8,470,973, US Patent Appl. Pub. No. US 2013/0217119, U.S. Pat. No. 8,420,782, US Patent Appl. Pub. No. US 2011/0301073, US Patent Appl. Pub. No. US 2011/0145940, U.S. Pat. Nos. 8,450,471, 8,440,431, 8,440,432, and US Patent Appl. Pub. No. 2013/0122581, the contents of all of which are hereby incorporated by reference). Other gene-editing proteins include clustered regularly interspaced short palindromic repeat (CRISPR)-associated proteins. However, current methods for gene editing cells are inefficient and carry a risk of uncontrolled mutagenesis, making them undesirable for research, therapeutic or cosmetic use. Methods for DNA-free gene editing of somatic cells have not been previously explored, nor have methods for simultaneous or sequential gene editing and reprogramming of somatic cells. In addition, methods for directly gene editing cells in patients (i.e., in vivo) have not been previously explored, and the development of such methods has been limited by a lack of acceptable targets, inefficient delivery, inefficient expression of the gene-editing protein/proteins, inefficient gene editing by the expressed gene-editing protein/proteins, due in part to poor binding of DNA-binding domains, excessive off-target effects, due in part to non-directed dimerization of the FokI cleavage domain and poor specificity of DNA-binding domains, and other factors. Finally, the use of gene editing in anti-bacterial, anti-viral, and anti-cancer treatments has not been previously explored.

[0493] In various embodiments, the present methods and compositions include using a nucleic acid drug, including a synthetic RNA, in the diagnosing, treating, preventing or ameliorating of a disease, disorder and/or condition described herein. In various embodiments, the present methods and compositions include using a nucleic acid drug, including a synthetic RNA, in the altering, modifying and/or changing of a tissue (e.g. cosmetically).

[0494] Generally speaking, in various embodiments, a synthetic RNA as described herein is administered to a human at specific doses described herein and the synthetic RNA comprises a sequence, sometimes referred to as a target sequence that encodes a protein of interest, which may be a therapeutic protein.

[0495] Synthetic RNA comprising only canonical nucleotides can bind to pattern recognition receptors, can be recognized as a pathogen-associated molecular pattern, and can trigger a potent immune response in cells, which can result in translation block, the secretion of inflammatory cytokines, and cell death. It has now been discovered that synthetic RNA comprising certain non-canonical nucleotides can evade detection by the innate immune system, and can be translated at high efficiency into protein, including in humans. It has been further discovered that synthetic RNA comprising at least one of the non-canonical nucleotides described herein, including, for example, a member of the group: 5-methylcytidine, 5-hydroxycytidine, 5-hydroxymethylcytidine, 5-carboxycytidine, 5-formylcytidine, 5-methoxycytidine, pseudouridine, 5-hydroxyuridine, 5-methyluridine, 5-hydroxymethyluridine, 5-carboxyuridine, 5-methoxyuridine, 5-formyluridine, 5-hydroxypseudouridine, 5-methylpseudouridine, 5-hydroxymethylpseudouridine, 5-carboxypseudouridine, 5-methoxypseudouridine, and 5-formylpseudouridine can evade detection by the innate immune system, and can be translated at high efficiency into protein, including in humans. Certain embodiments are therefore directed to a method for inducing a cell to express a protein of interest comprising contacting a cell with synthetic RNA. Other embodiments are directed to a method for transfecting a cell with synthetic RNA comprising contacting a cell with a solution comprising one or more synthetic RNA molecules. Still other embodiments are directed to a method for treating a patient comprising administering to the patient synthetic RNA. In one embodiment, the synthetic RNA comprises at least one of the non-canonical nucleotides described herein, including, for example, a member of the group: 5-methylcytidine, 5-hydroxycytidine, 5-hydroxymethylcytidine, 5-carboxycytidine, 5-formylcytidine, 5-methoxycytidine, pseudouridine, 5-hydroxyuridine, 5-methyluridine, 5-hydroxymethyluridine, 5-carboxyuridine, 5-methoxyuridine, 5-formyluridine, 5-hydroxypseudouridine, 5-methylpseudouridine, 5-hydroxymethylpseudouridine, 5-carboxypseudouridine, 5-methoxypseudouridine, and 5-formylpseudouridine. In another embodiment, the synthetic RNA encodes a protein of interest. Exemplary RNAs may contain combinations and levels of non-canonical and non-canonical nucleotides as described elsewhere herein, including with respect to the expression of any protein of interest described herein. In yet another embodiment, the method results in the expression of the protein of interest. In a further embodiment, the method results in the expression of the protein of interest in the patient's skin.

[0496] Other embodiments are directed to a method for delivering a nucleic acid to a cell in vivo. Still other embodiments are directed to a method for inducing a cell in vivo to express a protein of interest. Still other embodiments are directed to a method for treating a patient. In one embodiment, the method comprises disrupting the stratum corneum. In another embodiment, the method comprises contacting a cell with a nucleic acid. In yet another embodiment, the method results in the cell internalizing the nucleic acid. In a further embodiment, the method results in the cell expressing the protein of interest. In a still further embodiment, the method results in the expression of the protein of interest in the patient. In a still further embodiment, the method results in the amelioration of one or more of the patient's symptoms. In a still further embodiment, the patient is in need of the protein of interest. In a still further embodiment, the patient is deficient in the protein of interest.

[0497] Still other embodiments are directed to a method for treating a patient comprising delivering to a patient a composition. In another embodiment, the composition comprises one or more nucleic acid molecules. In yet another embodiment, at least one of the one or more nucleic acid molecules encodes a protein of interest. In some embodiments, the nucleic acid is synthetic RNA. In other embodiments, the method results in the amelioration of one or more of the patient's symptoms. Other embodiments are directed to a method for treating an indication by delivering to a cell or a patient a nucleic acid encoding a protein or a peptide. Still other embodiments are directed to a composition comprising a nucleic acid encoding a protein or a peptide. Indications that can be treated using the methods and compositions of the present invention and proteins and peptides that can be encoded by compositions of the present invention are set forth in Table 3A, Table 3B, and/or Table 3C, and are given by way of example, and not by way of limitation. In one embodiment, the indication is selected from Table 3A, Table 3B, and/or Table 3C. In another embodiment the protein or peptide is selected from Table 3A, Table 3B, and/or Table 3C. In yet another embodiment, the indication and the protein or peptide are selected from the same row of Table 3A, Table 3B, and/or Table 3C. In another embodiment, the protein is a gene-editing protein. In yet another embodiment, the gene-editing protein targets a gene that is at least partly responsible for a disease phenotype. In yet another embodiment, the gene-editing protein targets a gene that encodes a protein selected from Table 3A, Table 3B, and/or Table 3C. In still another embodiment, the gene-editing protein corrects or eliminates, either alone or in combination with one or more other molecules or gene-editing proteins, a mutation that is at least partly responsible for a disease phenotype.

[0498] In various embodiments, the present invention contemplates the targeting of the precursor forms and/or mature forms and/or isoforms and/or mutants of any of the proteins disclosed in Table 3A, Table 3B, and/or Table 3C and such proteins. In some embodiments, any of the precursor forms and/or mature forms and/or isoforms and/or mutants have enhanced secretion relative to the corresponding wild type proteins. In some embodiments, any of the precursor forms and/or mature forms and/or isoforms and/or mutants have altered half-lives (e.g. serum, plasma, intracellular)—for instance, longer or shorter half-lives. In some embodiments, this is relative to wild type.

TABLE 3A
Illustrative Indications

| Illustrative | |
|---|---|
| Indication | Illustrative Protein/Peptide |
| Acne | Retinol Dehydrogenase 10 |
| Aging | Elastin, sp\|P15502\|ELN_HUMAN Elastin, (isoform 3), |
| | (SEQ ID NO: 486) |
| Aging | Collagen Type I, P02452\|CO1A1_HUMAN Collagen |
| | alpha-1(I) chain, (SEQ ID NO: 487); P08123\|CO1A2_ |
| | HUMAN Collagen alpha-2(I) chain, (SEQ ID NO: 488) |
| Aging | Collagen Type III, P02461\|CO3A1_HUMAN Collagen |
| | alpha-1(III) chain, (isoform 1), (SEQ ID NO: 489) |
| Aging | Collagen Type VII, Q02388\|CO7A1_HUMAN |
| | Collagen alpha-1(VII) chain, (SEQ ID NO: 490) |
| Aging | Hyaluronan Synthase |
| Aging | Telomerase Reverse Transcriptase |
| Albinism | Tyrosinase, P14679\|TYRO_HUMAN Tyrosinase, |
| | (isoform 1), (SEQ ID NO: 491) |
| Alport | Collagen Type IV; P02462\|CO4A1_HUMAN Collagen |
| Syndrome | alpha-1(IV) chain, (isoform 1), (SEQ ID NO: 492); |
| | P08572\|CO4A2_HUMAN Collagen alpha-2(IV) chain, |
| | (SEQ ID NO: 493); Q01955\|CO4A3_HUMAN Collagen |
| | alpha-3(IV) chain, (isoform 1), (SEQ ID NO: 494); |
| | P53420\|CO4A4_HUMAN Collagen alpha-4(IV) chain, |
| | (SEQ ID NO: 495); P29400\|CO4A5_HUMAN Collagen |
| | alpha-5(IV) chain, (isoform 1), (SEQ ID NO: 496); |
| | Q14031\|CO4A6_HUMAN Collagen alpha-6(IV), |
| | (isoform A), (SEQ ID NO: 497) |
| Anemia | Erythropoietin |
| Atopic | Filaggrin |
| Dermatitis | |
| Cutis Laxa | Elastin, sp\|P15502\|ELN_HUMAN Elastin, (isoform 3), |
| | (SEQ ID NO: 486) |
| Dry Skin | Filaggrin |
| Dystrophic | Collagen Type VII; Q02388\|CO7A1_HUMAN Collagen |
| Epidermo- | alpha-1(VII) chain, (SEQ ID NO: 498) |
| lysis | |
| Bullosa | |
| Ehlers- | Collagen Type V; P20908\|CO5A1_HUMAN Collagen |
| Danlos | alpha-1(V) chain, (SEQ ID NO: 499); P05997\|CO5A2_ |
| Syndrome | HUMAN Collagen alpha-2(V) chain, (SEQ ID NO: 500); |
| | P25940\|CO5A3_HUMAN Collagen alpha-3(V) chain, |
| | (SEQ ID NO: 501) |
| Ehlers- | Collagen Type 1, P02452\|CO1A1_HUMAN Collagen |
| Danlos | alpha-1(I) chain, (SEQ ID NO: 487); P08123\|CO1A2_ |
| Syndrome | HUMAN Collagen alpha-2(I) chain, (SEQ ID NO: 488) |
| Epidermo- | ADAM17, P78536\|ADA17_HUMAN Disintegrin and |
| lysis | metalloproteinase domain-containing protein 17, |
| bullosa, | (isoform A), (SEQ ID NO: 502) |
| lethal | |
| acantho- | |
| lytic | |
| Epidermo- | Collagen Type III, P02461\|CO3A1_HUMAN Collagen |
| lysis | alpha-1(III) chain, (isoform 1), (SEQ ID NO: 489) |
| bullosa, | |
| type IV | |
| Erythro- | Ferrochelatase, P22830\|HEMH_HUMAN Ferrochelatase, |
| poietic | mitochondrial, (isoform 1), (SEQ ID NO: 503) |
| Proto- | |
| porphyria | |
| Eczema | Filaggrin |
| Excess Fat | Thermogenin, P25874\|UCP1_HUMAN Mitochondrial |
| | brown fat uncoupling protein 1, (SEQ ID NO: 504) |
| Excess Fat | Lipase; Lipoprotein lipase, P06858\|LIPL_HUMAN |
| | Lipoprotein lipase, (SEQ ID NO: 516); Hepatic lipase, |
| | P11150\|LIPC_HUMAN Hepatic triacylglycerol lipase, |
| | (SEQ ID NO: 517); Pancreatic lipase, P16233\|LIPP_ |
| | HUMAN Pancreatic triacylglycerol lipase, (SEQ ID NO: |
| | 518); Endothelial lipase, (isoform 1), Q9Y5X9\|LIPE_ |
| | HUMAN Endothelial lipase, (SEQ ID NO: 519); |
| | Lysosomal lipase, P38571\|LICH_HUMAN Lysosomal |
| | acid lipase/cholesteryl ester hydrolase, (isoform 1), |
| | (SEQ ID NO: 520); Hormone sensitive lipase, |
| | Q05469\|LIPS_HUMAN Hormone-sensitive lipas, |
| | (isoform 1), (SEQ ID NO: 521); Gastric lipase, |
| | P07098\|LIPG_HUMAN Gastrict riacylglycerol lipase, |
| | (isoform 1), (SEQ ID NO: 522); Pancreatic Lipase- |
| | Related Protein 1), P54315\|LIPR1_HUMAN Inactive |
| | pancreatic lipase-related protein 1, (isoform 1), (SEQ |
| | ID NO: 523); Pancreatic Lipase-Related Protein 2, |
| | P54317\|LIPR2_HUMAN Pancreatic lipase-related protein |
| | 2, (SEQ ID NO: 524); Carboxyl Ester Lipase, P19835\| |
| | CEL_HUMAN Bile salt-activated lipase, (isoform long), |
| | (SEQ ID NO: 525) |
| Hypo- | ADAM17, P78536\|ADA17_HUMAN Disintegrin and |
| trichosis | metalloproteinase domain-containing protein 17, (isoform |
| | A), (SEQ ID NO: 502) |
| Ichthyosis | Filaggrin |
| Vulgaris | |
| Infections | Genetic Antibiotics (e.g. Anti-Sigma Factors) |
| Inflam- | Desmoglein 2, Q14126\|DSG2_HUMAN Desmoglein-2, |
| matory | (SEQ ID NO: 505) |
| and | |
| Bullous | |
| Skin | |
| Bowel | |
| Syndrome | |
| Keratosis | Retinol Dehydrogenase 10 |
| Pilaris | |
| Oily Skin | Retinol Dehydrogenase 10 |
| Osteo- | Hyaluronan Synthase |
| arthritis | |
| Pemphigus | Plakophilin-1, Q13835\|PKP1_HUMAN Plakophilin-1, |
| Vulgaris | (isoform 2), (SEQ ID NO: 506) |
| Pseudo- | Elastin, sp\|P15502\|ELN_HUMAN Elastin, (isoform 3), |
| xanthoma | (SEQ ID NO: 486) |
| elasticum | |
| Psoriasis | Retinol Dehydrogenase 10 |
| Scar | Tyrosinase, P14679\|TYRO_HUMAN Tyrosinase, |
| Treatment | (isoform 1), (SEQ ID NO: 491) |
| Scarring | Elastin, sp\|P15502\|ELN_HUMAN Elastin, (isoform 3), |
| | (SEQ ID NO: 486) |
| Scarring | Collagen Type 1, P02452\|CO1A1_HUMAN Collagen |
| | alpha-1(I) chain, (SEQ ID NO: 487); P08123\|CO1A2_ |
| | HUMAN Collagen alpha-2(I) chain, (SEQ ID NO: 488) |
| Scarring | Collagen Type III, P02461\|CO3A1_HUMAN Collagen |
| | alpha-1(III) chain, (isoform 1), (SEQ ID NO: 489) |
| Skin | Interferon; Interferon, Alpha 1, P01562\|IFNA1_HUMAN |
| Cancer | Interferon alpha-1/13, (SEQ ID NO: 530); Interferon, |
| | Alpha 2, P01563\|IFNA2_HUMAN Interferon alpha-2, |
| | (SEQ ID NO: 531); Interferon, Alpha 4, P05014\|IFNA4_ |
| | HUMAN Interferon alpha-4, (SEQ ID NO: 532); |
| | Interferon, Alpha 5, P01569\|IFNA5_HUMAN Interferon |
| | alpha-5, (SEQ ID NO: 533), Interferon, Alpha 6, |
| | P05013\|IFNA6_HUMAN Interferon alpha-6, (SEQ ID NO: |
| | 534); Interferon, Alpha 7, P01567\|IFNA7_HUMAN |
| | Interferon alpha-7, (SEQ ID NO: 535); Interferon, Alpha 8, |
| | P32881\|IFNA8_HUMAN Interferon alpha-8, (SEQ ID NO: |
| | 536); Interferon, Alpha 10, P01566\|IFN10_HUMAN |
| | Interferon alpha-10, (SEQ ID NO: 537); Interferon, Alpha |
| | 14, P01570\|IFN14_HUMAN Interferon alpha-14 OS, (SEQ |
| | ID NO: 538); Interferon, Alpha 16, P05015\|IFN16_ |
| | HUMAN Interferon alpha-16, (SEQ ID NO: 539); |
| | Interferon, Alpha 17, P01571\|IFN17_HUMAN Interferon |
| | alpha-17, (SEQ ID NO: 540); Interferon, Alpha 21, |
| | P01568\|IFN21_HUMAN Interferon alpha-21, (SEQ ID |
| | NO: 541); Interferon, Gamma, P01579\|IFNG_HUMAN |
| | Interferon gamma, (SEQ ID NO: 542); Interferon, Beta, |
| | P01574\|IFNB_HUMAN Interferon beta, (SEQ ID NO: |
| | 543); Interferon, Kappa, Q9P0W0\|IFNK_HUMAN |
| | Interferon kappa, (SEQ ID NO: 544); Interferon, |
| | Epsilon, Q86WN2\|IFNE_HUMAN Interferon epsilon, |
| | (SEQ ID NO: 545) |
| Striate | ADAM17, P78536\|ADA17_HUMAN Disintegrin and |
| Palmo- | metalloproteinase domain-containing protein 17, (isoform |
| plantar | A), (SEQ ID NO: 502) |
| Kerato- | |
| derma | |
| Tanning | Tyrosinase, P14679\|TYRO_HUMAN Tyrosinase, (isoform |
| | 1), (SEQ ID NO: 491) |
| Vitiligo | Melanocyte-Stimulating Hormone; Alpha-MSH, P01189\| |
| | 138-150, (SEQ ID NO: 526); , Beta-MSH, P01189\|217-234, |
| | (SEQ ID NO: 527); Gamma-MSH, P01189\|77-87, (SEQ ID |
| | NO: 528); Proopiomelanocortin, P01189\|COLI_HUMAN |
| | Pro-opiomelanocortin, (SEQ ID NO: 529) |
| Vitiligo | Tyrosinase, P14679\|TYRO_HUMAN Tyrosinase, (isoform |
| | 1), (SEQ ID NO: 491) |
| Warts | Interferon; Interferon, Alpha 1, P01562\|IFNA1_HUMAN |
| | Interferon alpha-1/13, (SEQ ID NO: 530); Interferon, Alpha |
| | 2, P01563\|IFNA2_HUMAN Interferon alpha-2, (SEQ ID |
| | NO: 531); Interferon, Alpha 4, P05014\|IFNA4_HUMAN |
| | Interferon alpha-4, (SEQ ID NO: 532); Interferon, Alpha 5, |
| | P01569\|IFNA5_HUMAN Interferon alpha-5, (SEQ ID NO: |
| | 533), Interferon, Alpha 6, P05013\|IFNA6_HUMAN |
| | Interferon alpha-6, (SEQ ID NO: 534); Interferon, Alpha |
| | 7, P01567\|IFNA7_HUMAN Interferon alpha-7, (SEQ ID |
| | NO: 535); Interferon, Alpha 8, P32881\|IFNA8_HUMAN |
| | Interferon alpha-8, (SEQ ID NO: 536); Interferon, Alpha |
| | 10, P01566\|IFN10_HUMAN Interferon alpha-10, (SEQ |
| | ID NO: 537); Interferon, Alpha 14, P01570\|IFN14_ |
| | HUMAN Interferon alpha-14 OS, (SEQ ID NO: 538); |
| | Interferon, Alpha 16, P05015\|IFN16_HUMAN Interferon |
| | alpha-16, (SEQ ID NO: 539); Interferon, Alpha 17, P01571\| |
| | IFN17_HUMAN Interferon alpha-17, (SEQ ID NO: 540); |
| | Interferon, Alpha 21, P01568\|IFN21_HUMAN Interferon |
| | alpha-21, (SEQ ID NO: 541); Interferon, Gamma, |
| | P01579\|IFNG_HUMAN Interferon gamma, |
| | (SEQ ID NO: 542); Interferon, Beta, P01574\|IFNB_ |
| | HUMAN Interferon beta, (SEQ ID NO: 543); |
| | Interferon, Kappa, Q9P0W0\|IFNK_HUMAN Interferon |
| | kappa, (SEQ ID NO: 544); Interferon, Epsilon, |
| | Q86WN2\|IFNE_HUMAN Interferon epsilon, |
| | (SEQ ID NO: 545) |
| Wound | Elastin, sp\|P15502\|ELN_HUMAN Elastin, (isoform 3), |
| Healing | (SEQ ID NO: 486) |
| Wound | Collagen Type 1, P02452\|CO1A1_HUMAN Collagen |
| Healing | alpha-1(I) chain, (SEQ ID NO: 487); P08123\|CO1A2_ |
| | HUMAN Collagen alpha-2(I) chain, (SEQ ID NO: 488) |
| Wound | Collagen Type III, P02461\|CO3A1_HUMAN Collagen |
| Healing | alpha-1(III) chain, (isoform 1), (SEQ ID NO: 489) |
| Xeroderma | DNA Polymerase Eta, Q9Y253\|POLH_HUMAN DNA |
| Pigment- | polymerase eta, (isoform 1), (SEQ ID NO: 507) |
| osum | |

[0499] In Table 3B, all Illustrative Identifiers (e.g. Gene Seq nos. and references are hereby incorporated by reference in their entireties).

TABLE 3B
Illustrative Proteins and Illustrative Peptides
Protein/Peptide Illustrative Identifier Reference

Transthyretin (TTR), (SEQ ID NOs: 637 and 638), Gene ID: 7276
Endothelial Cell Specific Molecule 1, (SEQ ID NO: 784 and 785), Gene ID: 11082
Parathyroid hormone, P012701PTHY_HUMAN Parathyroid hormone, (SEQ ID NO: 508)
BMP-1 GeneSeq Accession P80618 WO8800205, P13497/BMP1_HUMAN Bone morphogenetic protein 1, (isoform BMP1-3), (SEQ ID NO: 169)
P13497-2|BMP1_HUMAN Isoform BMP1-1 of Bone morphogenetic protein 1, (isoform BMP1-1), (SEQ ID NO: 509)
P13497-3|BMP1_HUMAN Isoform BMP1-4 of Bone morphogenetic protein 1, (isoform BMP1-4), (SEQ ID NO: 510)
P13497-4|BMP1_HUMAN Isoform BMP1-5 of Bone morphogenetic protein 1, (isoform BMP1-5), (SEQ ID NO: 511)
P13497-5|BMP1_HUMAN Isoform BMP1-6 of Bone morphogenetic protein 1, (isoform BMP1-6), (SEQ ID NO: 512)
P13497-6|BMP1_HUMAN Isoform BMP1-7 of Bone morphogenetic protein 1, (isoform BMP1-7), (SEQ ID NO: 513)
BMP-2 GeneSeq Accession P80619 WO8800205, P12643/BMP2_HUMAN Bone morphogenetic protein 2, (SEQ ID NO: 170)
BMP-3, P12645|BMP3_HUMAN Bone morphogenetic protein 3, (SEQ ID NO: 514)
BMP-2B GeneSeq Accession W24850 U.S Pat. No. 5,631,142, P12644/BMP4_HUMAN Bone morphogenetic protein 4, (SEQ ID NO: 171)
BMP-4 GeneSeq Accession B02796 WO0020591, P12644/BMP4_HUMAN Bone morphogenetic protein 4, (SEQ ID NO: 172)
BMP-5 GeneSeq Accession B02797 WO0020591, P22003/BMP5_HUMAN Bone morphogenetic protein 5, (isoform 1), (SEQ ID NO: 173)
P22003-2|BMP5_HUMAN Isoform 2 of Bone morphogenetic protein 5, (isoform 2), (SEQ ID NO: 515)
BMP-6 GeneSeq Accession R32904 U.S Pat. No. 5,187,076, P22004/BMP6_HUMAN Bone morphogenetic protein 6, (SEQ ID NO: 174)
Osteogenic Protein-1; OP-1; BMP-7 GeneSeq Accession W34783 WO973462, P18075/BMP7_HUMAN Bone morphogenetic protein 7,
(SEQ ID NO: 175)
BMP7 Variant A, (SEQ ID NO: 579)
BMP7 Variant B, (SEQ ID NO: 580)
BMP7 Variant C, (SEQ ID NO: 581)
Osteogenic Protein-2 GeneSeq Accession R57973 WO9406399, P34820/BMP8B_HUMAN Bone morphogenetic protein 8B, (SEQ ID NO: 176)
GDF-1 GeneSeq Accession R60961 WO9406449, P27539/GDF1_HUMAN Embryonic growth/differentiation factor 1, (SEQ ID NO: 177)
BMP-9 GeneSeq Accession R86903 WO9533830, Q9UK05/GDF2_HUMAN Growth/differentiation factor 2, (SEQ ID NO: 178)
BMP-10 GeneSeq Accession R66202 WO9426893, Q95393/BMP10_HUMAN Bone morphogenetic protein 10, (SEQ ID NO: 179)
BMP-12 GeneSeq Accession R78734 WO9516035, Q7Z4P5/GDF7_HUMAN Growth/differentiation factor 7, (SEQ ID NO: 180)
BMP-15 GeneSeq Accession W11261 WO9636710, O95972/BMP15_HUMAN Bone morphogenetic protein 15, (SEQ ID NO: 181)
BMP-17 GeneSeq Accession Y17870 WO9929718, SEQ ID NO: 2 from U.S Pat. No. 7,151,086, (SEQ ID NO: 182)
BMP-18 GeneSeq Accession Y17871 WO9929718, SEQ ID NO: 4 from U.S Pat. No. 7,151,086, (SEQ ID NO: 183)
Inhibin alpha GeneSeq Accession B02806 WO0020591, P05111/INHA_HUMAN Inhibin alpha chain, (SEQ ID NO: 184)
Inhibin beta GeneSeq Accession H02808 WO0020591, P08476/INHBA_HUMAN Inhibin beta A chain, (SEQ ID NO: 185)
P09529/INHBB_HUMAN Inhibin beta B chain, (SEQ ID NO: 186)
Cerberus Protein GeneSeq Accession W86032 WO9849296, O95813/CER1_HUMAN Cerberus, (SEQ ID NO: 187)
Soluble BMP Receptor Kinase Protein- 3 GeneSeq Accession R95227 WO9614579, Q13873/BMPR2_HUMAN Bone morphogenetic
protein receptor type-2, (SEQ ID NO: 188)
BMP Processing Enzyme Furin GeneSeq Accession W36099 WO9741250, P09958/FURIN_HUMAN Furin, (SEQ ID NO: 189)
TGF-beta 1 GeneSeq Accession R29657 WO9216228, P01137/TGFB1_HUMAN Transforming growth factor beta-1, (SEQ ID NO: 190)
TGF-beta 2 GeneSeq Accession R39659 EP542679, P61812/TGFB2_HUMAN Transforming growth factor beta-2, (SEQ ID NO: 191)
ZTGF-beta 9 GeneSeq Accession Y70654 WO0015798, SEQ ID NO: 2 of WO0015798, (SEQ ID NO: 192)
Anti-TGF beta family antibodies GB2305921
Latent TGF beta binding protein II GeneSeq Accession Y70552 WO0012551, Q14767/LTBP2_HUMAN Latent-transforming growth factor
beta-binding protein 2, (SEQ ID NO: 193)
MP52 GeneSeq Accession W36100 WO9741250, P43026/GDF5_HUMAN Growth/differentiation factor 5, (SEQ ID NO: 194)
b57 Protein GeneSeq Accession W69293 WO9837195, SEQ ID NO: 2 of WO9837195, (SEQ ID NO: 195)
Resistin GeneSeq Accession W69293 WO0064920, Q9HD89/RETN_HUMAN Resistin, (isoform 1), (SEQ ID NO: 196)
Galectin-4 GeneSeq Accession W11841 WO9703190, P56470/LEG4_HUMAN Galectin-4, (SEQ ID NO: 197)
APM-I; ACRP-30; Famoxin GeneSeq Accession Y71035 WO0026363, Q15848/ADIPO_HUMAN Adiponectin, (SEQ ID NO: 198)
ACRP-30 Homologue; Complement Component Clq C GeneSeq Accession B30234 WO0063376, P02747/C1QC_HUMAN Complement
C1q subcomponent subunit C, (SEQ ID NO: 199)
Calpain-10a GeneSeq Accession Y79567 WO0023603, Q9HC96/CAN10_HUMAN Calpain-10, (Isoform A), (SEQ ID NO: 200)
Calpain-10b GeneSeq Accession Y79568 WO0023603, Q9HC96-2/CAN10_HUMAN Isoform B of Calpain-10, (SEQ ID NO: 201)
Calpain-10c GeneSeq Accession Y79569 WO0023603, Q9HC96-3/CAN10_HUMAN Isoform C of Calpain-10, (SEQ ID NO: 202)
PDGF-D GeneSeq Accession Y71130 WO0027879, Q9GZP0/PDGFD_HUMAN Platelet-derived growth factor D, (isoform 1), (SEQ ID NO: 203)
FasL GeneSeq Accession Y28594 WO9936079, P48023/TNFL6_HUMAN Tumor necrosis factor ligand superfamily member 6, (isoform 1),
(SEQ ID NO: 204)
Chondro modulin-like protein GeneSeq Accession Y71262 WO0029579, SEQ ID NO: 2 from WO0029579, (SEQ ID NO: 370)
Patched GeneSeq Accession W72969 U.S Pat. No. 5,837,538, Q13635/PTC1_HUMAN Protein patched homolog 1, (isoform L), (SEQ ID NO: 205)
Patched-2 GeneSeq Accession Y43261 WO9953058, Q9Y6C5/PTC2_HUMAN Protein patched homolog 2, (isoform 1), (SEQ ID NO: 206)
Maspin; Protease Inhibitor 5 GeneSeq Accession R50938 WO9405804, P36952/SPB5_HUMAN Serpin B5, (isoform 1), (SEQ ID NO: 207)
Endostatin GeneSeq Accession B28399 WO0064946, P39060/COIA1_HUMAN Collagen alpha-1(XVIII) chain, (isoform 1), (SEQ ID NO: 208)
aFGF; FGF-1 GeneSeq Accession P94037 EP298723, P05230/FGF1_HUMAN Fibroblast growth factor 1, (isoform 1), (SEQ ID NO: 209)
bFGF; FGF-2 GeneSeq Accession R06685 FR2642086, P09038/FGF2_HUMAN Fibroblast growth factor 2, (isoform 1), (SEQ ID NO: 210)
FGF-3; INT-2 GeneSeq Accession R07824 WO9503831, P11487/FGF3_HUMAN Fibroblast growth factor 3, (SEQ ID NO: 211)
FGF-4; HST-1; HBGF-4 GeneSeq Accession R07825 WO9503831, P08620/FGF4_HUMAN Fibroblast growth factor 4, (isoform 1), (SEQ ID NO: 212)
FGF-5 GeneSeq Accession W22600 WO9730155, P12034/FGF5_HUMAN Fibroblast growth factor 5, (isoform long), (SEQ ID NO: 213)
FGF-6; Heparin binding secreted transforming factor-2 GeneSeq Accession R58555 EP613946, P10767/FGF6_HUMAN Fibroblast growth factor 6,
(SEQ ID NO: 214)
FGF-8 GeneSeq Accession R80783 WO9524928, P55075/FGF8_HUMAN Fibroblast growth factor 8, (isoform 8E), (SEQ ID NO: 215)
FGF-9; Gila activating factor GeneSeq Accession R70822 WO9503831, P31371/FGF9_HUMAN Fibroblast growth factor 9, (SEQ ID NO: 216)
FGF-12; Fibroblast growth factor homologous factor-1 GeneSeq Accession WO6309 WO9635708, P61328/FGF12_HUMAN Fibroblast growth
factor 12, (isoform 1), (SEQ ID NO: 217)
FGF-19 GeneSeq Accession Y08582 WO9927100, O95750/FGF19_HUMAN Fibroblast growth factor 19, (SEQ ID NO: 218)
FGF-16 GeneSeq Accession Y05474 WO9918128, O43320/FGF16_HUMAN Fibroblast growth factor 16, (SEQ ID NO: 219)
FGF-18 GeneSeq Accession Y08590 WO9927100, O76093/FGF18_HUMAN Fibroblast growth factor 18, (SEQ ID NO: 220)
fit-3 ligand GeneSeq Accession R67541 EP627487, P49771|FLT3L_HUMAN Fms-related tyrosine kinase 3 ligand, (isoform 1), (SEQ ID NO: 221)
VEGF-110 GeneSeq Accession Y69417 WO0013702, SEQ ID NO: 11 from WO0013702, (SEQ ID NO: 222)
VEGF-121 GeneSeq Accession B50432 WO0071713, SEQ ID NO: 2 from WO0071713, (SEQ ID NO: 223)
VEGF-138 GeneSeq Accession Y43483 WO9940197, SEQ ID NO: 4 of WO99/40197, (SEQ ID NO: 371)
VEGF-145 GeneSeq Accession Y69413 WO0013702, SEQ ID NO: 4 from WO0013702, (SEQ ID NO: 224)
VEGF-162 GeneSeq Accession Y43484 W09940197, SEQ ID NO: 8 of WO99/40197, (SEQ ID NO: 372)
VEGF-165 GeneSeq Accession Y69414 WO0013702, SEQ ID NO: 6 from WO0013702, (SEQ ID NO: 225)
VEGF-182 GeneSeq Accession Y43483 W09940197, SEQ ID NO: 6 of WO99/40197, (SEQ ID NO: 373)
VEGF-189 GeneSeq Accession Y69415 WO0013702, SEQ ID NO: 8 from WO0013702, (SEQ ID NO: 226)
VEGF-206 GeneSeq Accession Y69416 W00013702, SEQ ID NO: 10 from WO0013702, (SEQ ID NO: 227)
VEGF-D GeneSeq Accession W53240 WO9807832, O43915/VEGFD_HUMAN Vascular endothelial growth factor D, (SEQ ID NO: 374)
VEGF-E; VEGF-X GeneSeq Accession Y33679 WO9947677, SEQ ID NO: 2 from WO9947677, (SEQ ID NO: 228)
VEGF Receptor; KDR; flk-1 GeneSeq Accession W69679 WO9831794, P35968/VGFR2_HUMAN Vascular endothelial growth factor receptor 2,
(isoform 1), (SEQ ID NO: 229)
Soluble VEGF Receptor GeneSeq Accession W47037 U.S Pat. No. 5,712,380; sVEGF-RI (FIG. 3) of U.S Pat. No. 5,712,380, (SEQ ID NO: 442);
sVEGF-RII (FIG. 11) of U.S Pat. No. 5,712,380, (SEQ ID NO: 443); sVEGF-RTMI (FIG. 15) of U.S Pat. No. 5,712,380, (SEQ ID NO: 444);
sVEGF-RTMII (FIG. 13) of U.S Pat. No. 5,712,380, (SEQ ID NO: 445)
fit-1 GeneSeq Accession Y70751 WO0021560, P17948/VGFR1_HUMAN Vascular endothelial growth factor receptor 1, (isoform 1), (SEQ ID NO: 230)
VEGF R-3; flt-4 GeneSeq Accession B29047 WO0058511, P35916/VGFR3_HUMAN Vascular endothelial growth factor receptor 3, (isoform 1),
(SEQ ID NO: 231)
Neuropilin-1 GeneSeq Accession Y06319 WO9929858, O14786/NRP1_HUMAN Neuropilin-1, (isoform 1), (SEQ ID NO: 232)
Neuropilin-2 GeneSeq Accession Y03618 WO9929858, O60462/NRP2_HUMAN Neuropilin-2, (isoform A22), (SEQ ID NO: 233)
Human fast twitch skeletal muscle troponin C GeneSeq Accession W22597 WO9730085, P02585/TNNC2_HUMAN Troponin C, skeletal muscle,
(SEQ ID NO: 234)
Human fast twitch skeletal muscle troponin I GeneSeq Accession W18054 WO9730085, P48788/TNNI2_HUMAN Troponin I, fast skeletal muscle,
(isoform 1), (SEQ ID NO: 235)
Human fast twitch skeletal muscle troponin T GeneSeq Accession W22599 WO9730085, SEQ ID NO: 3 of WO9730085, (SEQ ID NO: 236)
Fragment. myofibrillar protein troponin I GeneSeq Accession W18053 WO9719955, SEQ ID NO: 3 of WO9719955, (SEQ ID NO: 237)
myofibrillar protein troponin I GeneSeq Accession W18054 WO9719955, SEQ ID NO: 3 of WO9719955, (SEQ ID NO: 237)
Troponin peptides GeneSeq Accessions Y29581, Y29582, Y29583, Y29584, Y29585, and Y29586 WO9933874. Wildtype troponins provided as:
Human fast twitch skeletal muscle troponin C
GeneSeq Accession W22597 W09730085, P02585/TNNC2_HUMAN Troponin C, skeletal muscle, (SEQ ID NO: 234); Human fast twitch
skeletal muscle troponin I GeneSeq Accession W18054 W09730085, P48788/TNNI2_HUMAN Troponin 1, fast skeletal
muscle, (isoform 1), (SEQ ID NO: 235); Human fast twitch skeletal musde troponin T GeneSeq Accession W22599 W09730085, SEQ ID
NO: 3 of WO9730085, (SEQ ID NO: 236); fragment. myofibrillar protein troponin I GeneSeq Accession W18053 W09719955, SEQ ID NO:
3 of WO9719955, (SEQ ID NO: 237); Human fast twitch skeletal muscle Troponin subunit C GeneSeq Accession B00134
WO0054770, SEQ ID NO: 1 of WO0054770, (SEQ ID NO: 375); Human fast twitch skeletal muscle Troponin subunit I
Protein GeneSeq Accession B00135 WO0054770, SEQ ID NO: 2 of WO0054770, (SEQ ID NO: 376); Human fast twitch skeletal muscle
Troponin subunit T GeneSeq Accession B00136 WO0054770, SEQ ID NO: 3 of WO0054770, (SEQ ID NO: 377)
Human fast twitch skeletal muscle Troponin subunit C GeneSeq Accession B00134 WO0054770, SEQ ID NO: 1 of WO0054770, (SEQ ID NO: 375)
Human fast twitch skeletal muscle Troponin subunit I Protein GeneSeq Accession B00135 WO0054770, SEQ ID NO: 2 of WO0054770,
(SEQ ID NO: 376)
Human fast twitch skeletal muscle Troponin subunit T GeneSeq Accession B00136 WO0054770, SEQ ID NO: 3 of WO0054770, (SEQ ID NO: 377)
Activator lnbibitor-1; PAI-1 GeneSeq Accession R08411 WO9013648, P05121/PAI1_HUMAN Plasminogen activator inhibitor 1, (isoform 1),
(SEQ ID NO: 238)
Plasminogen Activator Inhibitor-2; PAI-2 GeneSeq Accession P94160 DE3722673, P05120/PAI2_HUMAN Plasminogen activator inhibitor 2,
(SEQ ID NO: 239)
Activator Inhibitor-2; PAI-2 GeneSeq Accession R10921 WO9102057, P05120/PAI2_HUMAN Plasminogen activator inhibitor 2, (SEQ ID NO: 239)
Human PAI-1 mutants GeneSeq Accessions R11755, R11756, R11757, R11758, R11759, R11760, R11761, R11762 and R11763 WO9105048,
Wildtype PAI-1 is provided as P05121/PAILHUMAN Plasminogen activator inhibitor 1, (isoform 1), (SEQ ID NO: 238)
CXCR3; CXC GeneSeq Accession Y79372 WO0018431, P49682|CXCR3_HUMAN C-X-C chemokine receptor type 3, (isoform 1), (SEQ ID NO: 240)
Modified Rantes GeneSeq Accession W38129 WO9737005, Wildtype Rantes provided herein as P13501/CCL5_HUMAN C-C motif chemokine 5,
(SEQ ID NO: 241)
RANTES GeneSeq Accession Y05299 EP905240, P13501/CCL5_HUMAN C-C motif chemokine 5, (SEQ ID NO: 241)
MCP-Ia GeneSeq Accession R73914 WO9509232, MCP-1 provided as P13500/CCL2_HUMAN C-C motif chemokine 2, (SEQ ID NO: 337)
MCP-Ib GeneSeq Accession Y26176 WO9929728, MCP-1 provided as P13500/CCL2_HUMAN C-C motif chemokine 2, (SEQ ID NO: 337)
MCP-I receptor GeneSeq Accession R79165 WO9519436: MCP-1A? SEQ ID NO: 2 of WO9519436, (SEQ ID NO: 446); MCP-1B,
SEQ ID NO: 4 of WO9519436, (SEQ ID NO: 447)
MCP-3 GeneSeq Accession R73915 W09509232, P80098/CCL7_HUMAN C-C motif chemokine 7, (SEQ ID NO: 336)
MCP-4 receptor GeneSeq Accession W56689 WO9809171, SEQ ID NO: 2 of WO9809171, (SEQ ID NO: 378)
RANTES receptor GeneSeq Accession W29588 U.S Pat. No. 5,652,133, SEQ ID NO: 2 of U.S Pat. No. 5,652,133, (SEQ ID NO: 379)
CCR5 variant GeneSeq Accession W88238 WO9854317, Variants of wildtype CCR5 which has the sequence, of: P51681|CCR5_HUMAN C-C
chemokine receptor type 5, (SEQ ID NO: 448)
CCR7 GeneSeq Accession B50859 U.S Pat. No. 6,153,441, P32248/CCR7_HUMAN C-C chemokine receptor type 7, (SEQ ID NO: 243)
CXC3 GeneSeq Accession W23345 WO9727299, P78423/X3CD_HUMAN Fractalkine, (SEQ ID NO: 244)
Eotaxin GeneSeq Accession W10099 WO9700960, P51671/CCL11_HUMAN Eotaxin, (SEQ ID NO: 245)
Neurotactin GeneSeq Accessions Y77537, W34307, Y53259, and, Y77539 U.S Pat. No. 6,013,257 WO9742224, P78423/X3CD_HUMAN
Fractalkine, (SEQ ID NO: 244)
Human CKbeta-9 GeneSeq Accession B50860 U.S Pat. No. 6,153,441, SEQ ID NO: 2 of U.S Pat. No. 6,153,441, (SEQ ID NO: 246)
Lymphotactin GeneSeq Accession B50052 WO0073320, P47992/XCL1_HUMAN Lymphotactin, (SEQ ID NO: 247)
MIP-3 alpha GeneSeq Accession W44398 WO9801557, P78556/CCL20_HUMAN C-C motif chemokine 20, (isoform 1), (SEQ ID NO: 248)
MIP-3 beta GeneSeq Accession W44399 WO9801557, Q99731/CCL19_HUMAN C-C motif chemokine 19, (SEQ ID NO: 249)
MIP-Gamma GeneSeq Accession R70798, WO2006135382, (SEQ ID NO: 457)
Stem Cell Inhibitory Factor GeneSeq Accession R11553 WO9104274, SCIF in Table I of WO9104274, (SEQ ID NO: 380); SCIF in Table II of
WO9104274, (SEQ ID NO: 381)
Thrombopoietin GeneSeq Accession R79905 WO9521920, P40225|TPO_HUMAN Thrombopoietin, (isoform 1), (SEQ ID NO: 250)
c-kit ligand; SCF; Mast cell growth factor; MGF; Fibrosarcoma-derived stem cell factor GeneSeq Accession Y53284, R83978 and
R83977 EP992579 and EP676470, P215831SCF_HUMAN Kit ligand, (isoform 1), (SEQ ID NO: 251)
Platelet derived growth factor GeneSeq Accession B48653 WO0066736, PDGF-A, P04085/PDGFA_HUMAN Platelet-derived growth factor
subunit A, (Isoform long), (SEQ ID NO: 257); PDGF-B, P01127/PDGFB_HUMAN Platelet-derived growth factor subunit B, (isoform 1),
(SEQ ID NO: 258)
Melanoma inhibiting protein GeneSeq Accession R69811 WO9503328, (SEQ ID NO: 458)
Glioma-derived growth factor GeneSeq Accession R08120 EP399816
Platelet derived growth factor precursor A GeneSeq Accession R84759 EP682110, PDGF-A precursor (variant D1), (SEQ ID NO: 382);
PDGF-A precursor (variant 13-1), (SEQ ID NO: 383)
Platelet derived growth factor precursor B GeneSeq Accession R84760 EP682110, FIG. 1 or FIG. 2, Wildtype PDGF-B provided as:,
PDGF-B, P01127/PDGFB_HUMAN Platelet-derived growth factor subunit B, (isoform 1), (SEQ ID NO: 258)
Platelet derived growth factor Bvsis GeneSeq Accession P80595 and P80596 EP282317, FIG. 1 of EP282317, (SEQ ID NO: 384)
Placental Growth Factor GeneSeq Accessions R23059 and R23060 WO9206194, P49763-2/PLGF_HUMAN Isoform PIGF-1 of
Placenta growth factor, (isoform PIGF-1), (SEQ ID NO: 252)
Placental Growth Factor- 2 GeneSeq Accession Y08289 DE19748734, P49763-3/PLGF_HUMAN Isoform PIGF-2 of Placenta
growth factor, (isoform PIGF-2), (SEQ ID NO: 253)
Thrombopoietin derivative1 GeneSeq Accession Y77244 WO0000612 (e.g. Table 3), Wildtype thrombopoietin provided as:,
P40225|TPO_HUMAN Thrombopoietin, (isoform 1), (SEQ ID NO: 250)
Thrombopoietin derivative2 GeneSeq Accession Y77255 WO0000612 (e.g. Table 3), Wildtype thrombopoietin provided as:,
P40225|TPO_HUMAN Thrombopoietin, (isoform 1), (SEQ ID NO: 250)
Thrombopoietin derivative 3 GeneSeq Accession Y77262, WO0000612 (e.g. Table 3), Wildtype thrombopoietin provided as:,
P40225|TPO_HUMAN Thrombopoietin, (isoform 1), (SEQ ID NO: 250)
Thrombopoietin derivative 4 GeneSeq Accession Y77267, WO0000612 (e.g. Table 3), Wildtype thrombopoietin provided as:,
P40225|TPO_HUMAN Thrombopoietin, (isoform 1), (SEQ ID NO: 250)
Thrombopoietin derivative 5 GeneSeq Accession Y77246, WO0000612 (e.g. Table 3), Wildtype thrombopoietin provided as:,
P40225|TPO_HUMAN Thrombopoietin, (isoform 1), (SEQ ID NO: 250)
Thrombopoietin derivative 6 GeneSeq Accession Y77253, WO0000612 (e.g. Table 3), Wildtype thrombopoietin provided as:,
P40225|TPO_HUMAN Thrombopoietin, (isoform 1), (SEQ ID NO: 250)
Thrombopoietin derivative, 7 GeneSeq Accession Y77256, WO0000612 (e.g. Table 3), Wildtype thrombopoietin provided as:,
P40225|TPO_HUMAN Thrombopoietin, (isoform 1), (SEQ ID NO: 250)
Fractalkine GeneSeq Accession Y53255 U.S Pat. No. 6,043,086, P78423/X3CL1_HUMAN Fractalkine, (SEQ ID NO: 244)
CXC3 GeneSeq Accession W23345 WO9757599, P78423/X3CD_HUMAN Fractalkine, (SEQ ID NO: 244)
CCR7 GeneSeq Accession B50859 U.S Pat. No. 6,153,441, P32248/CCR7_HUMAN C-C chemokine receptor type 7, (SEQ ID NO: 243)
Nerve Growth Factor-beta GeneSeq Accession R11474 EP414151, P01138/NGF_HUMAN Beta-nerve growth factor, (SEQ ID NO: 254)
Nerve Growth Factor-beta2 GeneSeq Accession W69725 EP859056, Fig 1 of EP859056, (SEQ ID NO: 465)
Neurotrophin-3 GeneSeq Accession W8889 WO9821234, P20783/NTF3_HUMAN Neurotrophin-3, (isoform 1), (SEQ ID NO: 255)
Neurotrophin-4 GeneSeq Accession R47100 WO9325684, P34130/NTF4_HUMAN Neurotrophin-4, (SEQ ID NO: 256)
Neurotrophin-4a GeneSeq Accession R47101 WO9325684, Wildtype neurotrophin provided as:, P34130/NTF4_HUMAN Neurotrophin-4,
(SEQ ID NO: 256)
Neurotrophin- 4b GeneSeq Accession R47102 WO9325684, P34130/NTF4_HUMAN Neurotrophin-4, (SEQ ID NO: 256)
Neurotrophin- 4c GeneSeq Accession R47103 WO9325684, P34130/NTF4_HUMAN Neurotrophin-4, (SEQ ID NO: 256)
Neurotrophin- 4d GeneSeq Accession R47102 WO9325684, P34130/NTF4_HUMAN Neurotrophin-4, (SEQ ID NO: 256)
Platelet-Derived Growth Factor A chain GeneSeq Accession R38918 U.S Pat. No. 5,219,739, P04085/PDGFA_HUMAN
Platelet-derived growth factor subunit A, (Isoform long), (SEQ ID NO: 257)
Platelet-Derived Growth Factor B chain GeneSeq Accession R38919 U.S Pat. No. 5,219,739, P01127/PDGFB_HUMAN
Platelet-derived growth factor subunit B, (isoform 1), (SEQ ID NO: 258)
Stromal Derived Factor-1 alpha GeneSeq Accession Y39995 WO9948528, P48061-2/SDF1_HUMAN Isoform Alpha of
Stromal cell-derived factor 1, (isoform alpha), (SEQ ID NO: 259)
Stromal Derived Factor-1 beta GeneSeq Accession R75420 CA2117953, P48061/SDF1_HUMAN Stromal cell-derived factor 1,
(isoform beta), (SEQ ID NO: 260)
Tarc GeneSeq Accession W14917 WO9711969, Q92583/CCL17_HUMAN C-C motif chemokine 17, (SEQ ID NO: 261)
Prolactin GeneSeq Accession R78691 WO9521625, P01236/PRL_HUMAN Prolactin, (SEQ ID NO: 262)
Prolactin2 GeneSeq Accession Y31764 U.S Pat. No. 5,955,346
Follicle stimulating hormone Alpha subunit GeneSeq Accession Y54160 EP974359, P01215/GLHA_HUMAN Glycoprotein hormones
alpha chain, (SEQ ID NO: 263)
Follicle stimulating hormone Beta subunit GeneSeq Accession Y54161 EP974359, P01225/FSHB_HUMAN Follitropin subunit beta,
(SEQ ID NO: 264)
Substance P (tachykinin) GeneSeq Accession B23027 WO0054053, (SEQ ID NO: 385)
Oxytocin (Neurophysin 1) GeneSeq Accession B24085 and B24086 WO0053755, P01178/NEU1_HUMAN Oxytocin-
neurophysin 1, (SEQ ID NO: 265)
Vasopressin (Neurophysin II) GeneSeq Accession B24085 and B24086 WO0053755, P01185/NEU2_HUMAN Vasopressin-
neurophysin 2-copeptin, (SEQ ID NO: 266)
IL-1 GeneSeq Accession P60326 EP165654, IL-1 alpha, P01583|IL1A_HUMAN Interleukin-1 alpha, (SEQ ID NO: 269); IL-1 beta,
P0158411L1B_HUMAN Interleukin-1 beta, (SEQ ID NO: 267)
IL-1 mature GeneSeq Accession R14855 EP456332, (mature truncated form wherein the precursor is cleaved between amino acids
116-117), (SEQ ID NO: 386)
IL-1 beta GeneSeq Accession Y08322 WO9922763, P01584|IL1B_HUMAN Interleukin-1 beta, (SEQ ID NO: 267)
IL-3 variants GeneSeq Accession P80382, P80383, P80384, and P80381 WO8806161, Variants of wildtype IL-3 which has the sequence:,
P0870011L3_HUMAN Interleukin-3, (SEQ ID NO: 449)
IL-4 GeneSeq Accession P70615 WO8702990, P05112/IL4_HUMAN Interleukin-4, (isoform 1), (SEQ ID NO: 268)
IL-4 muteins GeneSeq Accession W52151 W52152 W52153 W52154 W52155 W52156 W52157 W52158 W52159 W52160 W52161
W52162 W52163 W52164 and W52165 WO9747744, Variants of wildtype IL-4 which has the sequence:, P05112/IL4_HUMAN
Interleukin-4, (isoform 1), (SEQ ID NO: 268)
IL-1 alpha GeneSeq Accession P90108 EP324447, P01583|IL1A_HUMAN Interleukin-1 alpha, (SEQ ID NO: 269)
IL-3 variants GeneSeq Accession R38561, R38562, R38563, R38564, R38565, R38566, R38567, R38568, R38569, R38570, R38571, and
R38572 WO9307171, Variants of wildtype IL-3 which has the sequence:, P0870011L3_HUMAN Interleukin-3, (SEQ ID NO: 449)
IL-6 GeneSeq Accession R45717 and R45718 WO9402512, P05231/IL6_HUMAN Interleukin-6, (SEQ ID NO: 270)
IL-13 GeneSeq Accession R48624 WO9404680, P35225/IL13_HUMAN Interleukin-13, (SEQ ID NO: 271)
IL-4 mutein GeneSeq Accession R47182 DE4137333, Variants of wildtype IL-4 which has the sequence:, P05112/IL4_HUMAN
Interleukin-4, (isoform 1), (SEQ ID NO: 268)
IL-4 mutein Y124X GeneSeq Accession R47183 DE4137333, Variants of wildtype IL-4 which has the sequence:, P05112/IL4_HUMAN
Interleukin-4, (isoform 1), (SEQ ID NO: 268))
IL-4 mutein Yl 24G GeneSeq Accession R47184 DE4137333, Variants of wildtype IL-4 which has the sequence:, P05112/IL4_HUMAN
Interleukin-4, (isoform 1), (SEQ ID NO: 268)
Human Interleukin-10 (precursor) GeneSeq Accession R41664 WO9317698, P22301/IL10_HUMAN Interleukin-10, (precursor form is processed
into a truncated mature form), (SEQ ID NO: 272)
Human Interleukin-10 GeneSeq Accession R42642 WO9318783-A, SEQ ID NO: 3 of WO9318783-A, (mature IL-10), (SEQ ID NO: 273)
Human interleukin-1 beta precursor. GeneSeq Accession R42447 EP569042, P01584/IL1B_HUMAN Interleukin-1 beta, (SEQ ID NO: 274)
Interleukin- 1alpha GeneSeq Accession R45364 EP578278, P01583|IL1A_HUMAN Interleukin-1 alpha, (SEQ ID NO: 269)
Human interleukin-3 variant GeneSeq Accession R22814 JP04063595, Variants of wildtype IL-3 which has the sequence:, P0870011L3_HUMAN
Interleukin-3, (SEQ ID NO: 449)
IL-1i fragments GeneSeq Accession R35484 and R35485 EP541920
IL-1 inhibitor IL-Ii) GeneSeq Accession R35486 and R35484 EP5541920
ICE 22 kD subunit. GeneSeq Accession R33780 EP533350, SEQ ID NO: 16 of EP533350, (SEQ ID NO: 450)
ICE 20 kD subunit. GeneSeq Accession R33781 EP533350, SEQ ID NO: 17 of EP533350, (SEQ ID NO: 451)
ICE 10 kD subunit GeneSeq Accession R33782 EP533350, SEQ ID NO: 18 of EP533350, (SEQ ID NO: 452)
Human Interleukin-10 (precursor) GeneSeq Accession R41664 WO9317698, P22301/IL10_HUMAN Interleukin-10, (precursor form is processed into a
truncated mature form), (SEQ ID NO: 272)
Human Interleukin-10 GeneSeq Accession R42642 WO9318783, SEQ ID NO: 3 of WO9318783-A, (mature IL-10), (SEQ ID NO: 273)
Human Interleukin-1 beta precursor GeneSeq Accession R42447 EP569042, P01584/IL1B_HUMAN Interleukin-1 beta, (SEQ ID NO: 274)
Human interleukin-6 GeneSeq Accession R49041 WO9403492, P05231/IL6_HUMAN Interleukin-6, (SEQ ID NO: 270)
Mutant Interleukin 6 S176R GeneSeq Accession R54990 WO9411402, 5176R variant of wildtype IL-6 which has the sequence:, P05231/IL6_
HUMAN Interleukin-6, (SEQ ID NO: 270)
Interleukin 6 GeneSeq Accession R55256 JP06145063, P05231/IL6_HUMAN Interleukin-6, (SEQ ID NO: 270)
Interleukin 8 (IL-8) receptor GeneSeq Accession R53932 JP06100595, GenBank: AAA59159.1, (SEQ ID NO: 275)
Human interleukin-7 GeneSeq Accession R59919 U.S Pat. No. 5,328,988, P13232/IL7_HUMAN Interleukin-7, (isoform 1), (SEQ ID NO: 276)
IL-3 containing fusion protein. GeneSeq Accession R79342 and R79344 WO9521254, Fusions of wildtype IL-3 which has the sequence:,
P08700|1L3_HUMAN Interleukin-3, (SEQ ID NO: 449)
IL-3 mutant proteins GeneSeq Accession R79254, R79255, R79256, R79257, R79258, R79259, R79260, R79261, R79262, R79263, R79264,
R79265, R79266, R79267, R79268, R79269, R79270, R79271, R79272, R79273, R79274, R79275, R79276, R79277, R79278, R79279, R79280,
R79281, R79282, R79283, R79284, and R79285
ZA9402636, Variants of wildtype IL-3 which has the sequence:, P08700|IL3_HUMAN Interleukin-3, (SEQ ID NO: 449)
IL-12 p40 subunit. GeneSeq Accession R63018 AU9466072, P2946/|IL12B_HUMAN Interleukin-12 subunit beta, (SEQ ID NO: 277)
AGF GeneSeq Accession R64240 WO9429344, Q8NI99/ANGL6_HUMAN Angiopoietin-related protein 6, (SEQ ID NO: 278)
Human interlaukin-12 40 kD subunit GeneSeq Accession R79187 WO9519786, P2946/|IL12B_HUMAN Interleukin-12 subunit beta,
(SEQ ID NO: 277)
Human interleukin-15 receptor from clone Pb GeneSeq Accession R90843 WO9530695, Q132611115RA_
HUMAN Interleukin-15 receptor subunit alpha, Isoform 1), (SEQ ID NO: 453)
Human interleukin-7 GeneSeq Accession R92796 WO9604306, P13232/IL7_HUMAN Interleukin-7, (isoform 1), (SEQ ID NO: 276)
interleukin-9 GeneSeq Accession R92797 WO9604306, P15248/IL9_HUMAN Interleukin-9, (SEQ ID NO: 279)
interleukin-3 GeneSeq Accession R92801 WO9604306, P08700|IL3_HUMAN Interleukin-3, (SEQ ID NO: 280)
Human interleukin-5 GeneSeq Accession R92802 WO9604306, P05113/IL5_HUMAN Interleukin-5, (SEQ ID NO: 281)
Recombinant interleukin-16 GeneSeq Accession W33373 DE19617202, Q14005/IL16_HUMAN Pro-interleukin-16, (isoform 1), (SEQ ID NO: 282)
Human IL-16 protein GeneSeq Accession W33234 DE19617202, Q14005/IL16_HUMAN Pro-interleukin-16, (isoform 1), (SEQ ID NO: 282)
Thrl 17 human interleukin 9 GeneSeq Accession W27521 WO9708321, P15248|IL9_HUMAN Interleukin-9, (SEQ ID NO: 387)
Metl 17 human interleukin 9 GeneSeq Accession W27522 WO9708321, (SEQ ID NO: 388)
Human intracellular IL-1 receptor antagonist. GeneSeq Accession W77158 EP864585 (e.g. SEQ ID NOs: 12 to 19, or 22 to 25 of this publication).
Human interleukin-18 protein (IL-18) GeneSeq Accession W77158 EP864585, Q14116/IL18_HUMAN Interleukin-18, (isoform 1), (SEQ ID NO: 283)
Human interleukin-18 GeneSeq Accession W77077 EP861663, Q14116/IL18_HUMAN Interleukin-18, (isoform 1), (SEQ ID NO: 283)
Human interleukin 18 derivatives GeneSeq Accessions W77083, W77084, W77085, W77086, W77087, W77088, and W77089 EP861663,
Variants of wildtype IL18 which is provided as:, Q14116/IL18_HUMAN Interleukin-18, (isoform 1), (SEQ ID NO: 283)
Interleukin-9 (IL-9) mature protein (Thr117 version). GeneSeq Accession W68158 WO9827997, FIG. 2 of WO9827997, (SEQ ID NO: 389)
IL-9 mature protein variant (Met117 version) GenSeq Accession W68157 WO9827997, FIG. 3 of WO9827997, (SEQ ID NO: 390)
Human IL-9 receptor protein variant #3. GeneSeq Accession W64058 WO9824904, Wildtype IL-9R is provided as:, Q01113/IL9R_
HUMAN Interleukin-9 receptor, (isoform 1), SEQ ID NO: 303)
Human IL-9 receptor protein variant fragment GenSeq Accession W64060 WO9824904, Wildtype IL-9R is provided as:, Q01113/IL9R_HUMAN
Interleukin-9 receptor, (isoform 1), (SEQ ID NO: 303)
Human IL-9 receptor protein variant #3. GeneSeq Accession W64061 WO9824904, Wildtype IL-9R is provided as:, Q01113/IL9R_
HUMAN Interleukin-9 receptor, (isoform 1), SEQ ID NO: 303)
Human Interleukin-12 p40 protein GeneSeq Accession W51311 WO9817689, P2946/1IL12B_HUMAN Interleukin-12 subunit beta, (SEQ ID NO: 277)
Human Interleukin-12 p35 protein GeneSeq Accession W51312 WO9817689, P29459/IL12A_HUMAN Interleukin-12 subunit alpha, (SEQ ID NO: 284)
Human protein with IL-16 activity GeneSeq Accession W63753 DE19649233-
Human protein with IL-16 activity GeneSeq Accession W59425 DE19649233-
Human interleukin-15 GeneSeq Accession W53878 U.S Pat. No. 5,747,024, P40933/IL15_HUMAN Interleukin-15, (isoformIL15-S48AA),
(SEQ ID NO: 285)
Human wild- type interleukin-4 (hIL-4) protein GeneSeq Accession W52149 WO9747744, P05112/IL4_HUMAN Interleukin-4, (isoform 1),
(SEQ ID NO: 286)
interleukin-4 muteins GeneSeq Accessions W52150, W52151, W52153, W52154, W52155, W52156, W52157, W52158, W52159,
W52160, W52161, W52162, W52163, W52164, W52165, W52166, and W52167 WO9747744, Variants of wildtype IL-4
which has the sequence:, P05112/IL4_HUMAN Interleukin-4, (isoform 1), (SEQ ID NO: 268)
Human interleukin 1 delta GeneSeq Accession Y28408 WO9935268, SEQ ID NO: 4 of WO9935268, (SEQ ID NO: 287)
Human interleukin-1 receptor antagonist beta GeneSeq Accession Y24395 WO9935268,
Human EDIRF II protein sequence GeneSeq Accession Y22199 WO9932632, SEQ ID NO: 6 of WO9932632, (SEQ ID NO: 391)
Human EDIRF I protein sequence GeneSeq Accession Y22197 WO9932632, SEQ ID NO: 2 of WO9932632, (SEQ ID NO: 392)
Human IL- 1RD10 protein sequence GeneSeq Accession Y14131 WO9919480, SEQ ID NO: 20 of WO9919480
Human IL- 1RD9 GeneSeq Accession Y14122 WO9919480, SEQ ID NOS: 6, 8, 10 of WO9919480
Human DNAX interleukin-40 GeneSeq Accession Y09196 WO9919491, SEQ ID NO: 2 or 4 of, WO9919491, (SEQ ID NO: 454)
(DIL-40) alternative sequence GeneSeq Accession Y09197 WO9919491, SEQ ID NO: 4 of, WO9919491, (SEQ ID NO: 455)
IL-11 GeneSeq Accession R50176 WO9405318, P2080/1IL11_HUMAN Interleukin-11, (isoform 1), (SEQ ID NO: 288)
Human adipogenesis inhibitory factor GeneSeq Accession R43260 EP566410, (aIso known as IL-11), P2080/|IL11_HUMAN
Interleukin-11, (isoform 1), (SEQ ID NO: 288)
IL-11 GeneSeq Accession WO2202 JP08127539, P2080/|IL11_HUMAN Interleukin-11, (isoform 1), (SEQ ID NO: 288)
IL-14 GeneSeq Accession R55800 WO9416074, P40222/TXLNA_HUMAN Alpha-taxilin, (SEQ ID NO: 289)
IL-17 receptor GeneSeq Accession B03807 U.S Pat. No. 6,072,033, Q96F46/I17RA_HUMAN Interleukin-17 receptor A, (SEQ ID NO: 290)
IL-17 GeneSeq Accession R76573 WO9518826, Q16552/IL17_HUMAN Interleukin-17A, (SEQ ID NO: 291)
CTLA-8 GeneSeq Accession W13651 WO9704097, (also known as IL-17), Q16552/IL17_HUMAN Interleukin-17A, (SEQ ID NO: 291)
IL-19 GeneSeq Accession W37935 WO9808870, Q9UHD0|IL19_HUMAN Interleukin-19, (isoform 1), (SEQ ID NO: 292)
IL-21 (TIF) GeneSeq Accession Y92879 WO0024758, Q9HBE4/IL21_HUMAN Interleukin-21, (isoform 1), (SEQ ID NO: 293)
IL-8 receptor GeneSeq Accession R33420 WO9306229, IL-8RA, P25024/CXCR1_HUMAN C-X-C chemokine receptor type 1,
(SEQ ID NO: 294), IL-8RB, P25025/CXCR2_HUMAN C-X-C chemokine receptor type 2, (SEQ ID NO: 295)
Human type II interleukin-1 receptor GeneSeq Accession R85480 U.S Pat. No. 5,464,937, P27930/IL1R2_HUMAN Interleukin-1
receptor type 2, (SEQ ID NO: 296)
Human interleukin-12 receptor GeneSeq Accession R69632 EP638644, IL-12 receptor B1, P427011112R1_HUMAN Interleukin-12
receptor subunit beta-1, (isoform 1), (SEQ ID NO: 393), IL-12 receptor B2, Q99665|I12R2_HUMAN
Interleukin-12 receptor subunit beta-2, (isoform 1), (SEQ ID NO: 394)
Interleukin 8 receptor B GeneSeq Accession R80758 U.S Pat. No. 5,440,021, IL-8RB, P25025/CXCR2_HUMAN C-X-C chemokine
receptor type 2, (SEQ ID NO: 295)
Human IL-8 receptor protein hIL8RA GeneSeq Accession B09989 JP08103276, IL-8RA, P25024/CXCR1_HUMAN C-X-C chemokine receptor type 1,
(SEQ ID NO: 294)
Human IL-8 receptor protein hIL8R GeneSeq Accession B09990 JP08103276, IL-8RA, P25024/CXCR1_HUMAN C-X-C chemokine receptor type 1,
(SEQ ID NO: 294); IL-8RB, P25025/CXCR2_HUMAN C-X-C chemokine receptor type 2, (SEQ ID NO: 295)
Interleukin-2 receptor associated protein p43 GeneSeq Accession R97569 WO9621732-, SEQ ID NO: 2 of WO9621732, (SEQ ID NO: 395)
Human interleukin-17 receptor GeneSeq Accession W04185 WO9629408, Q96F46/I17RA_HUMAN Interleukin-17 receptor A, (SEQ ID NO: 290)
Human interleukin-11 receptor GeneSeq Accession R99090 WO9619574, Q14626/I11RA_HUMAN Interleukin-11 receptor subunit alpha,
(SEQ ID NO: 297)
Human interleukin-1 receptor accessory protein GeneSeq Accession W01911 WO9623067, Human IL1R Acp, SEQ ID NO: 3 of WO9623067,
(SEQ ID NO: 396); Soluble Human IL1R Acp, SEQ ID NO: 9 of WO9623067, (SEQ ID NO: 397)
AGF Protein GeneSeq Accession R92749 U.S Pat. No. 5,488,032, Q8NI99/ANGL6_HUMAN Angiopoietin-related protein 6, (SEQ ID NO: 278)
Human interleukin-1 type-3 receptor GeneSeq Accession R91064 WO9607739, SEQ ID NO: 2 and 4 of WO9607739, (SEQ ID NO: 398 and
SEQ ID NO: 399, respectively)
Human interleukin-13 beta receptor GeneSeq Accession W24972 WO9720926, SEQ ID NO: 2 from WO9720926, (SEQ ID NO: 400)
Human interleukin-13 alpha receptor GeneSeq Accession W24973 WO9720926, IL-13RA1, P78552/I13R1_HUMAN Interleukin-13 receptor subunit
alpha-1, (isoform 1), (SEQ ID NO: 298); IL-13RA2, Q14627/I13R2_HUMAN Interleukin-13 receptor subunit alpha-2, (SEQ ID NO: 299)
Human interleukin-4 receptor GeneSeq Accession W13499 U.S Pat. No. 5,599,905, P24394/IL4RA_HUMAN Interleukin-4 receptor subunit alpha,
(isoform 1), (SEQ ID NO: 300)
Human interleukin-12 beta-2 receptor GeneSeq Accession W12771 EP759466, Q9966/I12R2_HUMAN Interleukin-12 receptor subunit beta-2,
(isoform 1), (SEQ ID NO: 301)
Human interleukin-12 beta-1 receptor. GeneSeq Accession W12772 EP759466, P4270/I12R1_HUMAN Interleukin-12 receptor subunit beta-1,
(isoform 1), (SEQ ID NO: 302)
Human IL-9 receptor protein GeneSeq Accessions W64055, W64056, and W64057 WO9824904, Q01113/IL9R_HUMAN Interleukin-9 receptor,
(isoform 1), (SEQ ID NO: 303)
IL-10 receptor GeneSeq Accession W41804 U.S Pat. No. 5,716,804, IL-10RA, Q13651/I10R1_HUMAN Interleukin-10 receptor subunit alpha,
(SEQ ID NO: 304); IL-10RB, Q0833/I10R2_HUMAN Interleukin-10 receptor subunit beta, (SEQ ID NO: 305)
Human IL-6 receptor GeneSeq Accession Y30938 JP11196867, P08887/IL6RA_HUMAN Interleukin-6 receptor subunit alpha, (isoform 1),
(SEQ ID NO: 306)
II-17 receptor GeneSeq Accession Y97181 U.S Pat. No. 6,096,305, Q96F46/I17RA_HUMAN Interleukin-17 receptor A, (SEQ ID NO: 290)
II-17 receptor GeneSeq Accession Y97131 U.S Pat. No. 6,100,235, Q96F46/I17RA_HUMAN Interleukin-17 receptor A, (SEQ ID NO: 290)
Human interleukin-3 receptor GeneSeq Accession R25300 EP509826, P26951/IL3RA_HUMAN Interleukin-3 receptor subunit alpha, (isoform 1),
(SEQ ID NO: 307)
Human GM-CSF receptor GeneSeq Accession R10919 WO9102063, GM-CSF receptor A, P15509/CSF2R_HUMAN Granulocyte-macrophage colony-
stimulating factor receptor subunit alpha, (isoform 1), (SEQ ID NO: 308); GM-CSF receptor B, P32927/IL3RB_HUMAN Cytokine receptor
common subunit beta, (isoform 1), (SEQ ID NO: 309)
Human IL-5 receptor alpha chain GeneSeq Accession R25064 EP492214, Q01344/IL5RA_HUMAN Interleukin-5 receptor subunit alpha, (isoform 1),
(SEQ ID NO: 310)
II-5 receptor GeneSeq Accession W82842 WO9847923, Q01344/IL5RA_HUMAN Interleukin-5 receptor subunit alpha, (isoform 1), (SEQ ID NO: 310)
II-6 receptor GeneSeq Accession R37215 JP05091892, P08887/IL6RA_HUMAN Interleukin-6 receptor subunit alpha, (isoform 1), (SEQ ID NO: 306)
Human B cell stimulating factor-2 receptor GeneSeq Accession P90525 AU8928720, P08887/IL6RA_HUMAN Interleukin-6 receptor subunit alpha,
(isoform 1), (SEQ ID NO: 306)
IL-7 receptor clone GeneSeq Accession R08330 EP403114, P1687/|IL7RA_HUMAN Interleukin-7 receptor subunit alpha, (isoform 1),
(SEQ ID NO: 311)
EPO receptor; EPOR GeneSeq Accession R06512 WO9008822, P19235/EPOR_HUMAN Erythropoietin receptor, (isoform EPOR-F),
(SEQ ID NO: 312)
IL-15 receptor GeneSeq Accession R90843 WO9530695, Q1326/|I15RA_HUMAN Interleukin-15 receptor subunit alpha, (isoform 1),
(SEQ ID NO: 313)
CD137; 4-1BB Receptor Protein GeneSeq Accession R70977 WO9507984, Q07011/TNR9_HUMAN Tumor necrosis factor receptor superfamily
member 9, (SEQ ID NO: 314)
BCMA GeneSeq Accession Y71979 WO0068378, Q02223/TNR17_HUMAN Tumor necrosis factor receptor superfamily member 17, (isoform 1),
(SEQ ID NO: 315)
CD27 GeneSeq Accession R20814 WO9201049, P26842/CD27_HUMAN CD27 antigen, (SEQ ID NO: 316)
CD30 GeneSeq Accession R35478 DE4200043, P28908/TNR8_HUMAN Tumor necrosis factor receptor superfamily member 8, (isoform 1),
(SEQ ID NO: 317)
CD40 GeneSeq Accession Y33499 WO9945944, P25942/TNR5_HUMAN Tumor necrosis factor receptor superfamily member 5, (isoform 1),
(SEQ ID NO: 318)
EDAR Genbank Accession AAD50077, Q9UNE0|EDAR_HUMAN Tumor necrosis factor receptor superfamily member EDAR, (isoform 1),
(SEQ ID NO: 319)
OX40; ACT-4 GeneSeq Accession R74737 WO9512673, P43489/TNR4_HUMAN Tumor necrosis factor receptor superfamily member 4,
(SEQ ID NO: 320)
TACI GeneSeq Accession W75783 WO9839361, O14836/TR13B_HUMAN Tumor necrosis factor receptor superfamily member 13B, (isoform 1),
(SEQ ID NO: 321)
TNF-R GeneSeq Accession R10986 AU9058976, P19438/TNR1A_HUMAN Tumor necrosis factor receptor superfamily member 1A, (isoform 1),
(SEQ ID NO: 322)
TNF-RII; TNF p75 receptor; Death Receptor GeneSeq Accession R11141 EP418014, P20333/TNR1B_HUMAN Tumor necrosis factor receptor
superfamily member 1B, (isoform 1), (SEQ ID NO: 323)
hAPO-4; TROY GeneSeq Accession W93581 WO9911791, Q9N568/TNR19_HUMAN Tumor necrosis factor receptor superfamily member 19,
(isoform 1), (SEQ ID NO: 324)
TNF-alpha precursor GeneSeq Accession P60074 EP205038
Human TNF-alpha GeneSeq Accession R62463 EP619372, P01375/TNFA_HUMAN Tumor necrosis factor, (SEQ ID NO: 325)
Human TNF-alpha GeneSeq Accession R42679 EP563714, P01375/TNFA_HUMAN Tumor necrosis factor, (SEQ ID NO: 325)
Human TNF-beta (LT-alpha) GeneSeq Accession B37799 WO0064479, P01374/TNFB_HUMAN Lymphotoxin-alpha, (SEQ ID NO: 326)
LT-alpha GeneSeq Accession P70107 EP250000, P01374/TNFB_HUMAN Lymphotoxin-alpha, (SEQ ID NO: 326)
LT-beta GeneSeq Accession R56869 WO9413808, Q06643/TNFC_HUMAN Lymphotoxin-beta, (isoform 1), (SEQ ID NO: 327)
OPGL GeneSeq Accession W83195 WO9846751, O14788/TNF11_HUMAN Tumor necrosis factor ligand superfamily member 11, (isoform 1),
(SEQ ID NO: 328)
FasL GeneSeq Accession W98071 WO9903999, P48023/TNFL6_HUMAN Tumor necrosis factor ligand superfamily member 6, (isoform 1),
(SEQ ID NO: 329)
FasL GeneSeq Accession W95041 WO9903998, P48023/TNFL6_HUMAN Tumor necrosis factor ligand superfamily member 6, (isoform 1),
(SEQ ID NO: 329)
CD27L GeneSeq Accession R50121 WO9405691, P32970/CD70_HUMAN CD70 antigen, (isoform 1), (SEQ ID NO: 330)
CD30 ligand GeneSeq Accession R45007 WO9324135, P32971/TNFL8_HUMAN Tumor necrosis factor ligand superfamily member 8,
(SEQ ID NO: 331)
CD40L GeneSeq Accession R85486 WO9529935, P29965/CD40L_HUMAN CD40 ligand, (SEQ ID NO: 332)
4-1BB ligand GeneSeq Accession W26657 U.S Pat. No. 5,674,704, P41273/TNFL9_HUMAN Tumor necrosis factor ligand superfamily member 9,
(SEQ ID NO: 333)
FAS Ligand Inhibitory Protein (DcR3) GeneSeq Accession B19335 WO0058465, O95407/TNF6B_HUMAN Tumor necrosis factor receptor
superfamily member 6B, (SEQ ID NO: 334)
OX40L GeneSeq Accession R79903 WO9521915, P23510/TNFL4_HUMAN Tumor necrosis factor ligand superfamily member 4,
(isoform 1), (SEQ ID NO: 335)
Protease inhibitor peptides GeneSeq Accessions R12435, R12436, R12437, R12438, R12439, R12440, and R1244 WO9106561
Retroviral protease inhibitors GeneSeq Accessions R06660, R06661, R06662, R06663, R06664, R06665, R06666, R06667, R06668, R06669,
R06670, R06671, R06672, R06673, R06674, R06675, and R06676 EP387231
HIV protease inhibiting peptides GeneSeq Accessions R59293, R59294, R59295, R59296, R59297, R59298, R59299, R592300, R59301,
R59302, R59301, R59302, R59303, R59304, R59305, R59306, R59307, R59308, R59309, R59310, R59311, R59312, R59313, R59314,
R59315, R59316, R59317 R59318, R59319, R59320, R59321, R59322, R59323, R59324, R59325, R59326, R59327, R59328, R59329,
R59330, R59331, R59332, R59333, R59334, R59335, R59336, R59337, R59338, R59339, R59340, R59341, R59342, R59343, R59344,
R59345, R59346, R59347, R59348, R59349, and R59350 WO9301828
HIV-1 protease inhibitors GeneSeq Accessions R86326, R86327, R86328, R86329, R86330, R86331, R86332, R86333, R86334, R86335,
R86336, R86337, R86338, R86339, R86340, R86341, R86342, R86343, R86344, R86345, R86346, R86347, R86348, R86349, R86350,
R86351, R86352, R86353, R86354, R86355, R86356, R86357, R86358, R86359, R86360, R86361, R86362, R86363, R86364, R86365,
R86366, R86367, R86368, R86369, R86370, and R86371 DE4412174
HIV Inhibitor Peptide GeneSeq Accession Y89687 WO9959615
HIV Inhibitor Peptide GenSeq Accession Y31955 WO9948513
HIV Inhibitor Peptide Science 291, 884 (2001); Published online 12 Jan. 2001; 10.1126/science.1 057453
Human monocyte chemoattractant factor hMCP-3 GeneSeq Accession R73915 WO9509232, P80098/CCL7_HUMAN C-C motif chemokine 7,
(SEQ ID NO: 336)
Human monocyte chemoattractant factor hMCP-1 GeneSeq Accession R73914 WO9509232, P13500/CCL2_HUMAN C-C motif chemokine 2,
(SEQ ID NO: 337)
Human gro-beta chemokine GeneSeq Accessions R66699 and W17671 WO9429341, P19875/CXCL2_HUMAN C-X-C motif chemokine 2,
(SEQ ID NO: 338)
Human gro-gamma chemokine GeneSeq Accessions R66700 and W17672 WO9429341, P19876/CXCL3_HUMAN C-X-C motif chemokine 3,
(SEQ ID NO: 339)
Human gro-alpha chemokine GeneSeq Accessions R66698 and W18024 WO9429341, P09341/GROA_HUMAN Growth-regulated alpha protein,
(SEQ ID NO: 340)
Human eosinophil- expressed chemokine (EEC) GeneSeq Accession WO5186 WO9632481, SEQ ID NO: 2 of WO9632481, (SEQ ID NO: 401)
Chemokine-like protein PF4-414 Full-Length and Mature GeneSeq Accessions R92318 and R99809 WO9613587, FIG. 3C of WO9613587,
(SEQ ID NO: 402)
Chemokine-like protein IL-8M3 GeneSeq Accession R99812 WO9613587
Human interleukin-8 (IL-8) GeneSeq Accession R99814 WO9613587, P10145/IL8_HUMAN Interleukin-8, (isoform 1), (SEQ ID NO: 341)
Chemokine-like protein IL-8M1 Full-Length and Mature GeneSeq Accessions R99815 and R99803 WO9613587, FIG. 4B of
WO9613587, (SEQ ID NO: 403)
Chemokine-like protein IL-8M8 Full-Length and Mature GeneSeq Accessions R99816 and R99805 WO9613587, FIG. 4C of
WO9613587, (SEQ ID NO: 404)
Chemokine-like protein IL-8M8 Full-Length and Mature GeneSeq Accessions R99817 and R99806 WO9613587, FIG. 4C of
WO9613587, (SEQ ID NO: 404)
Chemokine-like protein IL-8M8 Full-Length and Mature GeneSeq Accessions R99818 and R99804 WO9613587, FIG. 4C of
WO9613587, (SEQ ID NO: 404)
Chemokine-like protein IL-8M8 Full-Length and Mature GeneSeq Accessions R99819 and R99807 WO9613587, FIG. 4C of
WO9613587, (SEQ ID NO: 404)
Chemokine-like protein IL-8M8 Full-Length and Mature GeneSeq Accessions R99822 and R9807 WO9613587, FIG. 4C of
WO9613587, (SEQ ID NO: 404)
Human foetal spleen ex- pressed chemo-kine, FSEC GeneSeq Accession R98499 WO9622374, SEQ ID NO: 2 of, WO9622374, (SEQ ID NO: 405)
Liver expressed chemokine-1(LVEC-1) GeneSeq Accession R95689 WO9616979, SEQ ID NO: 2 of, WO9616979, (SEQ ID NO: 406)
Liver expressed chemokine-2(LVEC-2) GeneSeq Accession R95690 WO9616979, SEQ ID NO: 4 of, WO9616979, (SEQ ID NO: 407)
Pituitary expressed chemokine (PGEC) GeneSeq Accession R95691 WO9616979, SEQ ID NO: 6 of, WO9616979, (SEQ ID NO: 408)
Adenoid-expressed chemokine (ADEC) GeneSeq Accession R97664 WO9617868, SEQ ID NO: 2 of, WO9617868, (SEQ ID NO: 409)
Human chemokine CC-2 GeneSeq Accession W38170 WO9741230, Q16663/CCL15_HUMAN C-C motif chemokine 15, (SEQ ID NO: 342)
Human chemokine HCC-1 GeneSeq Accession W38171 WO9741230, Q16627/CCL14_HUMAN C-C motif chemokine 14, (SEQ ID NO: 343)
Human chemokine CC-3 GeneSeq Accession W38172 WO9741230, Q16627/CCL14_HUMAN C-C motif chemokine 14, (SEQ ID NO: 343)
Novel betachemokine designated PTEC GeneSeq Accession W27271 WO9739126, SEQ ID NO: 2 of WO9739126, (SEQ ID NO: 410)
Human CX3C 111 amino acid chemokine GeneSeq Accession W23344 WO9727299, SEQ ID NO: 2 of WO9727299, (SEQ ID NO: 411)
Human CCF18 chemokine GeneSeq Accession W25942 WO9721812, SEQ ID NO: 4 of WO9721812, (SEQ ID NO: 412)
Human beta-chemokine H1305 (MCP-2) GeneSeq Accession W26655 WO9725427, P80075/CCL8_HUMAN C-C motif chemokine 8,
(SEQ ID NO: 344)
Human eosinocyte CC type chemokine eotaxin GeneSeq Accession W14990 WO9712914, P51671/CCL11_HUMAN Eotaxin, (SEQ ID NO: 245)
Human thymus and activation regulated cytokine (TARC) GeneSeq Accession W14018 WO9711969, Q92583/CCL17_HUMAN C-C motif
chemokine 17, (SEQ ID NO: 261)
Human chemokine beta-8 short forms GeneSeq Accession W16315 WO9712041, Wildtype chemokine beta-8 provided as:, P55773|CCL23_
HUMAN C-C motif chemokine 23, (SEQ ID NO: 459)
Microphage derived chemokine, MDC GeneSeq Accession W20058 WO9640923, O00626/CCL22_HUMAN C-C motif chemokine 22,
(SEQ ID NO: 345)
Human chemokine ZSIG-35 GeneSeq Accession W30565 WO9844117, SEQ ID NO: 2 of WO WO9844117, (SEQ ID NO: 413)
Primate CC chemokine “ILINCK” GeneSeq Accesssion W69990 WO98328658, SEQ ID NO: 4 from WO9832858, (SEQ ID NO: 414)
Primate CXC chemokine “IBICK” GeneSeq Accession W69989 WO9832858, SEQ ID NO: 2 from WO9832858, (SEQ ID NO: 415)
Human CC-type chemokine protein designated SLC (secondary lymphoid chemokine) GeneSeq Accession W69163 WO9831809, O00585/CCL21_
HUMAN C-C motif chemokine 21, (SEQ ID NO: 346)
Human CC chemokine ELC protein GeneSeq Accession W62542 WO9826071, Q99731/CCL19_HUMAN C-C motif chemokine 19,
(SEQ ID NO: 249)
Human DVic-1 C-C chemokine GeneSeq Accession W60649 WO9823750, SEQ ID NO: 2 of WO9823750, (SEQ ID NO: 416)
Human C-C chemokine DGWCC GeneSeq Accession W60650 WO9823750, SEQ ID NO: 6 of WO9823750, (SEQ ID NO: 417)
Human STCP-1 GeneSeq Accession W62783 WO9824907, O00626/CCL22_HUMAN C-C motif chemokine 22, (SEQ ID NO: 345)
Exodus protein GeneSeq Accession W61279 WO9821330, P78556/CCL20_HUMAN C-C motif chemokine 20, (isoform 1), (SEQ ID NO: 248)
Human Chr19kine protein GeneSeq Acession W50887 WO9814581, SEQ ID NO: 10 of WO9814581, (SEQ ID NO: 418)
Human T cell mixed lymphocyte reaction expressed chemokine (TMEC) GeneSeq Accession W58703 U.S Pat. No. 5,780,268, SEQ ID NO: 2 of
U.S Pat. No. 5,780,268, (SEQ ID NO: 460)
Human 6CKine protein GeneSeq Accession W50885 WO9814581, SEQ ID NO: 8 of WO9814581, (SEQ ID NO: 419)
human liver and activation regulated chemokine (LARC) GeneSeq Accession W57475 WO9817800, P78556/CCL20_HUMAN C-C motif chemokine
20, (isoform 1), (SEQ ID NO: 248)
RANTES peptide GeneSeq Accession W29538 WO9744462, Wildtype Rantes provided herien as P13501/CCL5_HUMAN C-C motif chemokine 5,
(SEQ ID NO: 241)
RANTES 8-68 GeneSeq Accession W29529 WO9744462, Wildtype Rantes provided herien as P13501/CCL5_HUMAN C-C motif chemokine 5,
(SEQ ID NO: 241)
RANTES 9-68 GeneSeq Accession W29528 WO9744462, Wildtype Rantes provided herien as P13501/CCL5_HUMAN C-C motif chemokine 5,
(SEQ ID NO: 241)
Human chemokine protein 331D5 GeneSeq Accession W59433 WO9811226, SEQ ID NO: 12 of WO9811226, (SEQ ID NO: 420)
Human chemokine protein 61164 GeneSeq Accession W59430 WO9811226, SEQ ID NO: 6 of WO9811226, (SEQ ID NO: 421)
Chemokine MCP-4 GeneSeq Accession W56690 WO9809171, Q99616/CCL13_HUMAN C-C motif chemokine 13, (SEQ ID NO: 347)
Human stromal cell-derived chemokine, SDF-1 GeneSeq Accession W50766 FR2751658, P48061/SDF1_HUMAN Stromal cell-derived factor 1,
(isoform beta), (SEQ ID NO: 260)
Thymus expressed chemokine (TECK) GeneSeq Accession W44397 WO9801557, O15444/CCL25_HUMAN C-C motif chemokine 25,
(SEQ ID NO: 348)
Human chemokine MIP-3alpha GeneSeq Accession W44398 WO9801557, P78556/CCL20_HUMAN C-C motif chemokine 20, (isoform 1),
(SEQ ID NO: 248)
Human chemokine MIP-3beta GeneSeq Accession W44399 WO9801557, Q99731/CCL19_HUMAN C-C motif chemokine 19, (SEQ ID NO: 249)
Human monocyte chemotactic proprotein (MCPP) sequence GeneSeq Accession W42072 WO9802459, SEQ ID NO: 1 of WO9802459,
(SEQ ID NO: 456)
Macrophage-derived chemokine (MDC) GeneSeq Accessions W40811 and Y24414 US Pat No. 5,688,927/U.S Pat. No. 5,932,703,
O00626/CCL22_HUMAN C-C motif chemokine 22, (SEQ ID NO: 345)
Macrophage derived chemokine analogue MDC-eyfy GeneSeq Accession Y24416 U.S Pat. No. 5,932,703 (“eyfy” disclosed as SEQ ID NO:
546), Wildtype MDC is SEQ ID NO: 2 of 5,932,703, (SEQ ID NO: 422)
Macrophage derived chemokine analogue MDC (n + 1) GeneSeq Accession Y24413 U.S Pat. No. 5,932,703
Macrophage derived chemokine analogue MDC-yl GeneSeq Accession Y24415 U.S Pat. No. 5,932,703
Human type CC chemokine eotaxin 3 protein sequence GeneSeq Accession Y43178 JP11243960, Q9Y258/CCL26_HUMAN C-C
motif chemokine 26, (SEQ ID NO: 349)
Human MCP-3 and human Muc-1 core epitope (VNT) fusion protein GeneSeq Acession Y29893 WO9946392, Wildtype MCP-3
has the sequence:, P80098/CCL7_HUMAN C-C motif chemokine 7, (SEQ ID NO: 336); Wildtype Muc-1 has the sequence:,
P15941|MUC1_HUMAN Mucin-1, (isoform 1), (SEQ ID NO: 461)
Human IP-10 and human Muc-1 core epitope (VNT) fusion protein GeneSeq Accession Y29894 WO9946392, Wildtype
IP10 has the sequence:, P02778/CXL10_HUMAN C-X-C motif chemokine 10, (SEQ ID NO: 242); Wildtype Muc-1 has the sequence:,
P15941|MUC1_HUMAN Mucin-1, (isoform 1), (SEQ ID NO: 461)
Human IP-10 and HIV-1 gp120 hyper-variable region fusion protein GeneSeq Accession Y29897 WO9946392, Wildtype
IP10 has the sequence:, P02778/CXL10_HUMAN C-X-C motif chemokine 10, (SEQ ID NO: 242); Wildtype gp120 has the sequence:,
P03378|32-509, (cleaved product of gp160), (SEQ ID NO: 462)
Human mammary associated chemokine (MACK) protein Full-Length and Mature GeneSeq Accessions Y29092 and Y29093 WO9936540,
Full-length: SEQ ID NO: 1 of WO9936540, (SEQ ID NO: 423); Mature Form: SEQ ID NO: 2 of WO9936540, (SEQ ID NO: 424)
Tim-1 protein GeneSeq Accession Y28290 WO9933990, SEQ ID NO: 2 of, WO9933990, (SEQ ID NO: 350)
Human Lkn-1 Full-Length and Mature protein GeneSeq Accessions Y17280, Y17274, Y17281, and Y17275 WO9928473 and WO9928472,
Q16663/CCL15_HUMAN C-C motif chemokine 15, (SEQ ID NO: 342)
N-terminal modified chemokine met- hSDF-1 alpha GeneSeq Accession Y05818 WO9920759, SEQ ID NO: 10 of WO9920759, (SEQ ID NO: 425)
N-terminal modified chemokine met- hSDF-1 beta GeneSeq Accession Y05819 WO9920759, SEQ ID NO: 11 of WO9920759, (SEQ ID NO: 426)
N-terminal modified chemokine GroHEK/hSDF-1alpha GeneSeq Accession Y05820 WO9920759, SEQ ID NO: 12 of WO9920759, (SEQ ID NO: 427)
N-terminal modified chemokine GroHEK/hSDF-1beta. GeneSeq Accession Y05821 WO9920759, SEQ ID NO: 13 of WO9920759, (SEQ ID NO: 428)
Chemokine Eotaxin GeneSeq Accession Y14230 WO9912968, P51671/CCL11_HUMAN Eotaxin, (SEQ ID NO: 245)
Chemokine hMCP1a GeneSeq Accession Y14225 WO9912968
Chemokine hMCP1b GeneSeq Accession Y14226 WO9912968
Chemokine hSDF1b GeneSeq Accession Y14228 WO9912968, P48061/SDF1_HUMAN Stromal cell-derived factor 1, (isoform beta),
(SEQ ID NO: 260)
Chemokine hIL-8 GeneSeq Accession Y14229 WO9912968, P10145/IL8_HUMAN Interleukin-8, (isoform 1), (SEQ ID NO: 341)
Chemokine hMCP1 GeneSeq Accession Y14222 WO9912968, P13500/CCL2_HUMAN C-C motif chemokine 2, (SEQ ID NO: 337)
Chemokine hMCP2 GeneSeq Accession Y14223 WO9912968, P80075/CCL8_HUMAN C-C motif chemokine 8, (SEQ ID NO: 344)
Chemokine hMCP3 GeneSeq Accession Y14224 WO9912968, P80098/CCL7_HUMAN C-C motif chemokine 7, (SEQ ID NO: 336)
C-C chemokine, MCP2 GeneSeq Accession Y05300 EP905240, P80075/CCL8_HUMAN C-C motif chemokine 8, (SEQ ID NO: 344)
Wild type monocyte chemotactic protein 2 GeneSeq Accession Y07233 EP906954, P80075/CCL8_HUMAN C-C motif chemokine 8, (SEQ ID NO: 344)
Truncated monocyte chemotactic protein 2 (6-76) GeneSeq Accession Y07234 EP906954, FIG. 1 of EP905241 and EP906954, (SEQ ID NO: 429)
Truncated RANTES protein (3-68) GeneSeq Accessions Y07236 and Y07232 EP905241; EP906954, FIG. 1 of EP906954, (SEQ ID NO: 430)
Wild type monocyte chemotactic protein 2 GeneSeq Accession Y07237 EP905241, P80075/CCL8_HUMAN C-C motif chemokine 8, (SEQ ID NO: 344)
Truncated monocyte chemotactic protein 2 (6-76) GeneSeq Accession Y07238 EP905241, FIG. 1 of EP905241 and EP906954, (SEQ ID NO: 429)
A partial CXCR4B protein GeneSeq Accession W97363 EP897980, SEQ ID NO: 2 of EP897980, (SEQ ID NO: 431)
Interferon gamma-inducible protein (IP-10) GeneSeq Accession W96709 U.S Pat. No. 5,871,723, P02778/CXL10_HUMAN C-X-C motif
chemokine 10, (SEQ ID NO: 242)
A monokine induced by gamma- interferon (MIG) GeneSeq Accession W96710 U.S Pat. No. 5,871,723, Q07325/CXCL9_HUMAN C-X-C motif
chemokine 9, (SEQ ID NO: 351)
Interleukin-8 (IL-8) protein. GeneSeq Accession W96711 U.S Pat. No. 5,871,723, P10145/IL8_HUMAN Interleukin-8, (isoform 1), (SEQ ID NO: 341)
Epithelial neutrophil activating protein-78 (ENA-78) GeneSeq Accession W96712 U.S Pat. No. 5,871,723, P42830/CXCL5_HUMAN C-X-C motif
chemokine 5, (SEQ ID NO: 352)
Growth related oncogene-alpha (GRO-alpha). GeneSeq Accession W96713 U.S Pat. No. 5,871,723, P09341/GROA_HUMAN Growth-regulated
alpha protein, (SEQ ID NO: 340)
Growth related oncogene-beta (GRO-beta). GeneSeq Accession W96714 U.S Pat. No. 5,871,723, P19875/CXCL2_HUMAN C-X-C motif
chemokine 2, (SEQ ID NO: 338)
Growth related oncogene- gamma (GRO-gamma) GeneSeq Accession W96715 U.S Pat. No. 5,871,723, P19876/CXCL3_HUMAN C-X-C
motif chemokine 3, (SEQ ID NO: 339)
A platelet basic protein (PBP) GeneSeq Accession W96716 U.S Pat. No. 5,871,723, P02775/CXCL7_HUMAN Platelet basic protein, (SEQ ID NO: 353)
Connective tissue activating protein-III (CTAP-III) GeneSeqAc- cession S96717 U.S Pat. No. 5,871,723, SEQ ID NO: 9 of U.S. Patent No. 5,871,723,
(SEQ ID NO: 354)
Beta-thrombo-globulin protein (beta-TG) GeneSeq Accession W96718 U.S Pat. No. 5,871,723, SEQ ID NO: 10 of U.S. Patent No. 5,871,723,
(SEQ ID NO: 355)
Neutrophil activating peptide-2 (NAP-2) GeneSeq Accession W96719 U.S Pat. No. 5,871,723, SEQ ID NO: 11 of U.S. Patent No.
5,871,723, (SEQ ID NO: 356)
Granulocyte chemotactic protein-2 (GCP-2) GeneSeq Accession W96720 U.S Pat. No. 5,871,723, P80162/CXCL6_HUMAN C-X-C
motif chemokine 6, (SEQ ID NO: 357)
Human chemokine MIG-beta protein GeneSeq Accession W90124 EP887409, (SEQ ID NO: 463)
Human ZCHEMO-8 GeneSeq Accession W82716 WO9854326, SEQ ID NO: 2 of WO9854326, (SEQ ID NO: 432)
Human Act-2 protein GeneSeq Accession W82717 WO9854326, P13236/CCL4_HUMAN C-C motif chemokine 4, (SEQ ID NO: 358)
Human SISD protein GeneSeq Acession W82720 WO9854326, P13501/CCL5_HUMAN C-C motif chemokine 5, (SEQ ID NO: 241)
Human MI10 protein GeneSeq Accession W82721 WO9854326, SEQ ID NO: 37 of WO9854326, (SEQ ID NO: 433)
Human MI1A protein GeneSeq Accession W82722 WO9854326, SEQ ID NO: 38 of WO9854326, (SEQ ID NO: 434)
Human CCC3 protein GeneSeq Accession W82723 WO9854326, SEQ ID NO: 39 of WO9854326, (SEQ ID NO: 435)
A human L105 chemokine designated huL105_3. GeneSeq Accession W87588 WO9856818, SEQ ID NO: 2 of WO9856818, (SEQ ID NO: 436)
A human L105 chemokine designated huL105_7. GeneSeq Accession W87589 WO9856818, SEQ ID NO: 4 of WO9856818, (SEQ ID NO: 437)
Human mature gro-alpha polypeptide used to treat sepsis GeneSeq Accession W81498 WO9848828, P09341/GROA_HUMAN Growth-
regulated alpha protein, (SEQ ID NO: 340)
Human mature gro-gamma polypeptide used to treat sepsis GeneSeq Accession W81500 WO9848828, P19876/CXCL3_HUMAN C-X-C
motif chemokine 3, (SEQ ID NO: 339)
Human thymus expressed chemokine TECK and TECK variant GeneSeq Accessions B19607 and B19608 WO0053635, Wildtype TECK provided as:,
O15444/CCL25_HUMAN C-C motif chemokine 25, (SEQ ID NO: 348)
Human chemokine SDF1alpha GeneSeq Accession B15791 WO0042071, P48061-2/SDF1_HUMAN Isoform Alpha of Stromal cell-derived factor 1,
(isoform alpha), (SEQ ID NO: 259),
Human chemokine GRO-alpha GeneSeq Accession B15793 WO0042071, P09341/GROA_HUMAN Growth-regulated alpha protein,
(SEQ ID NO: 340)
Human chemokine eotaxin GeneSeq Accession B15794 WO0042071, P51671/CCL11_HUMAN Eotaxin, (SEQ ID NO: 245)
Human chemokine MIG GeneSeq Accession B15803 WO0042071, Q07325/CXCL9_HUMAN C-X-C motif chemokine 9, (SEQ ID NO: 351)
Human chemokine PF4 GeneSeq Accession B15804 WO0042071, P02776/PLF4_HUMAN Platelet factor 4, (SEQ ID NO: 359)
Human chemokine I-309 GeneSeq Accession B15805 WO0042071, P22362/CCD_HUMAN C-C motif chemokine 1, (SEQ ID NO: 360)
Human chemokine HCC-1 GeneSeq Accession B15806 WO0042071, Q16627/CCL14_HUMAN C-C motif chemokine 14, (SEQ ID NO: 361)
Human chemokine C10 GeneSeq Accession B15807 WO0042071, SEQ ID NO: 49 of WO0042071, (SEQ ID NO: 438)
Human chemokine CCR-2 GeneSeq Accession B15808 WO0042071, P41597/CCR2_HUMAN C-C chemokine receptor type 2,
(isoform A), (SEQ ID NO: 362)
Human chemokine ENA-78 GeneSeq Accession B15809 WO0042071, P42830/CXCL5_HUMAN C-X-C motif chemokine 5, (SEQ ID NO: 352)
Human chemokine GRObeta GeneSeq Accession B15810 WO0042071, P19875/CXCL2_HUMAN C-X-C motif chemokine 2, (SEQ ID NO: 338)
Human chemokine IP-10 GeneSeq Accession B15811 WO0042071, P02778/CXL10_HUMAN C-X-C motif chemokine 10, (SEQ ID NO: 242)
Human chemokine SDF1beta GeneSeq Accession B15812 WO0042071, P48061/SDF1_HUMAN Stromal cell-derived factor 1, (isoform beta),
(SEQ ID NO: 260)
Human chemokine GRO alpha GeneSeq Accession B15813 WO0042071, P09341/GROA_HUMAN Growth-regulated alpha protein, (SEQ ID NO: 340),
Human chemokine MIP1beta GeneSeq Accession B15831 WO0042071, P13236/CCL4_HUMAN C-C motif chemokine 4, (SEQ ID NO: 358)
A human C-C chemokine designated exodus GeneSeq Accession B07939 U.S Pat. No. 6,096,300, P78556/CCL20_HUMAN C-C motif chemokine 20,
(isoform 1), (SEQ ID NO: 248)
Human chemokine L105_7 GeneSeq Accession Y96922 U.S Pat. No. 6,084,071, SEQ ID NO: 4 of WO9856818, (SEQ ID NO: 437)
Human chemokine L105_3 GeneSeq Accession Y96923 U.S Pat. No. 6,084,071, SEQ ID NO: 2 of WO9856818, (SEQ ID NO: 436)
Human secondary lymphoid chemokine (SLC) GeneSeq Accession B01434 WO0038706, O00585/CCL21_HUMAN C-C motif chemokine 21,
(SEQ ID NO: 346)
Human non- ELR CXC chemokine H174 GeneSeq Accession Y96310 WO0029439, O14625/CXL11_HUMAN C-X-C motif chemokine 11,
(SEQ ID NO: 363)
Human non- ELR CXC chemokine IP10 GeneSeq Accession Y96311 WO0029439, P02778/CXL10_HUMAN C-X-C motif chemokine 10,
(SEQ ID NO: 242)
Human non- ELR CXC chemokine Mig GeneSeq Accession Y96313 WO0029439, Q07325/CXCL9_HUMAN C-X-C motif chemokine 9,
(SEQ ID NO: 351)
Human chemokine Ckbeta-7 GeneSeq Accession Y96280 WO0028035, FIG. 1 of WO0028035, (SEQ ID NO: 439)
Human chemokine MIP-1alpha GeneSeq Accession Y96281 WO0028035, P10147/CCL3_HUMAN C-C motif chemokine 3, (SEQ ID NO: 364)
Human mature chemokine Ckbeta-7 (optionally truncated) GenSeq Accession Y96282 WO0028035, FIG. 1 of WO0028035, (SEQ ID NO: 440)
Human chemokine receptor CXCR3 GeneSeq Accession Y79372 WO0018431, P49682|CXCR3_HUMAN C-X-C chemokine
receptor type 3, (isoform 1), (SEQ ID NO: 240)
Human neurotactin chemokine like domain GeneSeq Accession Y53259 U.S Pat. No. 6,043,086, P78423/X3CD_HUMAN Fractalkine,
(SEQ ID NO: 244)
Human CC type chemokine interieukin C GeneSeq Accession Y57771 JP11302298
Human CKbeta- 9 GeneSeq Accession B50860 U.S Pat. No. 6,153,441, O00585/CCL21_HUMAN C-C motif chemokine 21, (SEQ ID NO: 346)
Preproapolipo-protein “paris” variant GeneSeq Accession WO8602 WO9637608, (SEQ ID NO: 466)
Preproapolipo-protein “milano” variant 5,721,114, SEQ ID NO: 6 of U.S. Pat. No. 5,721,114, (SEQ ID NO: 441)
Glycodelin-A; Progesterone- associated endometrial protein GeneSeq Accession WO0289 WO9628169, P09466/PAEP_HUMAN Glycodelin,
(SEQ ID NO: 365)
NOGO-A Genbank Accession CAB99248, (SEQ ID NO: 366)
NOGO-B Genbank Accession CAB99249, (SEQ ID NO: 367)
NOGO-C Genbank Accession CAB99250, (SEQ ID NO: 368),
NOGO-66 Receptor Genbank Accession AAG53612, (SEQ ID NO: 369)
Antibodies specific for collapsin U.S Pat. No. 5,416,197, Wildtype collapsin has the sequence:, SEQ ID NO: 2 of 5,416,197, (SEQ ID NO: 464)
Humanized Anti-VEGF Antibodies, and fragments thereof WO9845331
Humanized Anti-VEGF Antibodies, and fragments thereof WO0029584
Membrane bound proteins GeneSeq. Accession Y66631-Y66765 WO9963088
Secreted and Transmembrane polypeptides GeneSeq Accession B44241-B44334 WO0053756
Secreted and Transmembrane polypeptides GeneSeq Accession Y41685-Y41774 WO9946281
Interleukin 2 (IL-2), (SEQ ID NO: 548)
Interleukin 15_vA, (IL-15_vA), (SEQ ID NO: 549)
Interleukin 15_vB, (IL-15_vB), (SEQ ID NO: 550)
Interleukin 15_vC, (IL-15_vC), (SEQ ID NO: 551)
Interleukin 15_vD, (IL15_vD), (SEQ ID NO: 552)
Interleukin 15_vE, (IL15_vE), (SEQ ID NO: 553)
Interleukin 15_vF, (IL15_vF), (SEQ ID NO: 565)
Interleukin 22, (IL22), (SEQ ID NO: 554)
Fibroblast Growth Factor 1 (FGF1), (SEQ ID NO: 555)
Fibroblast Growth Factor 1_vA, (FGF1_vA), (SEQ ID NO: 556)
Fibroblast Growth Factor 1_vB, (FGF1_vB), (SEQ ID NO: 557)
Fibroblast Growth Factor 1_vC, (FGF1_vC), (SEQ ID NO: 566)
Fibroblast Growth Factor 19_vA, (FGF19_vA), (SEQ ID NO: 558)
Fibroblast Growth Factor 21, (FGF21), (SEQ ID NO: 559)
Fibroblast Growth Factor 23, (FGF23), (SEQ ID NO: 560)
Brain-Derived Neurotrophic Factor (BDNF), (SEQ ID NO: 561)
Serpin Family A Member 1, (SERPINA1), ((SEQ ID NO: 584) and ((SEQ ID NO: 585)
Serpin Peptidase Inhibitor, Clade B (Ovalbumin), Member 1, (SERPINB1), (SEQ ID NO: 562)
CASPASE1, (SEQ ID NO: 563)
Leukemia Inhibitory Factor, (LIF), (SEQ ID NO: 564)
Proprotein Convertase Subtilisin/Kexin Type 1, (PCSK1), (SEQ ID NO: 567)
Proprotein Convertase Subtilisin/Kexin Type 2 (PCSK2), (SEQ ID NO: 568)
Proprotein Convertase Subtilisin/Kexin Type 3, (PCSK3), (SEQ ID NO: 569)
Proprotein Convertase Subtilisin/Kexin Type 3 Sol, (PCSK3_SOL), (SEQ ID NO: 570)
Proprotein Convertase Subtilisin/Kexin Type 4, (PCSK4), (SEQ ID NO: 571)
Proprotein Convertase Subtilisin/Kexin Type 5, (PCSK5), (SEQ ID NO: 572)
Proprotein Convertase Subtilisin/Kexin Type 6 (PCSK6), (SEQ ID NO: 573)
Proprotein Convertase Subtilisin/Kexin Type, (PCSK7), (SEQ ID NO: 574)
Proprotein Convertase Subtilisin/Kexin Type 8, (PCSK8), (SEQ ID NO: 575)
Proprotein Convertase Subtilisin/Kexin Type 9, (PCSK9), (SEQ ID NO: 576)
Membrane-Bound Transcription Factor Peptidase, Site 2, (MBTPS2), (SEQ ID NO: 577)
Carboxypeptidase E, (CPE), (SEQ ID NO: 578)

[0500] In various embodiments, the present methods and compositions find use in treating or preventing one or more of diseases or disorders in the table below. In various embodiments, the present methods and compositions find use in treating or preventing one or more of diseases or disorders in the table below for instance by modulating the genes associated with the diseases in the table below. In some embodiments, the present methods and compositions find use in gene-editing the genes described in the below Table 3C using the present compositions.

TABLE 3C

| Category | Disease | Genes | Entrez ID |
|---|---|---|---|
| Disorders of | Galactosemia | GALT, | 2592, 2584, |
| carbohydrate | | GALK1, GALE | 2582 |
| metabolism | Essential fructosuria | KHK | 3795 |
| | Hereditary fructose | ALDOB | 229 |
| | intolerance | | |
| | Glycogen storage disease | G6PC, | 2538, 2542, |
| | type I | SLC37A4, | 10786 |
| | | SLC17A3 | |
| | Glycogen storage disease | GAA | 2548 |
| | type II | | |
| | Glycogen storage disease | AGL | 178 |
| | type III | | |
| | Glycogen storage disease | GBE1 | 2632 |
| | type IV | | |
| | Glycogen storage disease | PYGM | 5837 |
| | type V | | |
| | Glycogen storage disease | PYGL | 5836 |
| | type VI | | |
| | Glycogen storage disease | PYGM | 5837 |
| | type VII | | |
| | Glycogen storage disease | PHKA1, | 5255, 5256, |
| | type IX | PHKA2, | 5257, 5260, |
| | | PHKB, | |
| | | PHKG1, | 5261 |
| | | PHKG2 | |
| | Glycogen storage disease | SLC2A2 | 6514 |
| | type XI | | |
| | Glycogen storage disease | ALDOA | 226 |
| | type XII | | |
| | Glycogen storage disease | ENO1, ENO2, | 2023, 2026, |
| | type XIII | ENO3 | 2027 |
| | Glycogen storage disease | GYS1, GYS2 | 2997, 2998 |
| | type 0 | | |
| | Pyruvate carboxylase | PC | 5091 |
| | deficiency | | |
| | Pyruvate kinase deficiency | PKLR | 5313 |
| | Transaldolase deficiency | TALDO1 | 6888 |
| | Triosephosphate isomerase | TPI1 | 7167 |
| | deficiency | | |
| | Fructose bisphosphatase | FBP1 | 2203 |
| | deficiency | | |
| | Hyperoxaluria | AGXT, | 189, 9380 |
| | | GRHPR | |
| | Hexokinase deficiency | HK1 | 3098 |
| | Glucose-galactose | SLC5A1 | 6523 |
| | malabsorption | | |
| | Glucose-6-phosphate | G6PD | 2539 |
| | dehydrogenase deficiency | | |
| Disorders of | Alkaptonuria | HGD | 3081 |
| amino acid | Aspartylglucosaminuria | AGA | 175 |
| metabolism | Methylmalonic acidemia | MUT, MCEE, | 4594, 84693, |
| | | MMAA, | 166785, |
| | | MMAB, | 326625, |
| | | MMACHC, | 25974, 27249, |
| | | MMADHC, | 55788 |
| | | LMBRD1 | |
| | Maple syrup urine disease | BCKDHA, | 593, 594, |
| | | BCKDHB, | 1629, 1738 |
| | | DBT, DLD | |
| | Homocystinuria | CBS | 875 |
| | Tyrosinemia | FAH, TAT, | 2184, 6898, |
| | | HPD | 3242 |
| | Trimethylaminuria | FMO3 | 2328 |
| | Hartnup disease | SLC6A19 | 340024 |
| | Biotinidase deficiency | BTD | 686 |
| | Ornithine | OTC | 5009 |
| | carbamoyltransferase | | |
| | deficiency | | |
| | Carbamoyl-phosphate | CPS1 | 1373 |
| | synthase I deficiency disease | | |
| | Citrullinemia | ASS, | 445, 10165 |
| | | SLC25A13 | |
| | Hyperargininemia | ARG1 | 383 |
| | Hyperhomocysteinemia | MTHFR | 4524 |
| | Hypermethioninemia | MAT1A, | 4143, 27232, |
| | | GNMT, AHCY | 191 |
| | Hyperlysinemias | AASS | 10157 |
| | Nonketotic hyperglycinemia | GLDC, AMT, | 2731, 275, |
| | | GCSH | 2653 |
| | Propionic acidemia | PCCA, PCCB | 5095, 5096 |
| | Hyperprolinemia | ALDH4A1, | 8659, 5625 |
| | | PRODH | |
| | Cystinuria | SLC3A1, | 6519, 11136 |
| | | SLC7A9 | |
| | Dicarboxylic aminoaciduria | SLC1A1 | 6505 |
| | Glutaric acidemia type 2 | ETFA, ETFB, | 2108, 2109, |
| | | ETFDH | 2110 |
| | Isovaleric acidemia | IVD | 3712 |
| | 2-Hydroxyglutaric aciduria | L2HGDH, | 79944, |
| | | D2HGDH | 728294 |
| Disorders of | N-Acetylglutamate synthase | NAGS | 162417 |
| the urea | deficiency | | |
| cycle | Argininosuccinicaciduria | ASL | 435 |
| | Argininemia | ARG1 | 383 |
| Disorders of | Very long-chain | ACADVL | 37 |
| fatty acid | acyl-coenzyme A | | |
| metabolism | dehydrogenase deficiency | | |
| | Long-chain 3-hydroxyacyl- | HADHA | 3030 |
| | coenzyme A dehydrogenase | | |
| | deficiency | | |
| | Medium-chain | ACADM | 34 |
| | acyl-coenzyme A | | |
| | dehydrogenase deficiency | | |
| | Short-chain acyl-coenzyme | ACADS | 35 |
| | A dehydrogenase deficiency | | |
| | 3-hydroxyacyl-coenzyme A | HADH | 3033 |
| | dehydrogenase deficiency | | |
| | 2′4 Dienoyl-CoA reductase | NADK2 | 133686 |
| | deficiency | | |
| | 3-Hydroxy-3- | HMGCL | 3155 |
| | methylglutaryl-CoA | | |
| | lyase deficiency | | |
| | Malonyl-CoA decarboxylase | MLYCD | 23417 |
| | deficiency | | |
| | Systemic primary carnitine | SLC22A5 | 6584 |
| | deficiency | | |
| | Carnitine-acylcarnitine | SLC25A20 | 788 |
| | translocase deficiency | | |
| | Carnitine | CPT1A | 1374 |
| | palmitoyltransferase I | | |
| | deficiency | | |
| | Carnitine | CPT2 | 1376 |
| | palmitoyltransferase II | | |
| | deficiency | | |
| | Lysosomal acid lipase | LIPA | 3988 |
| | deficiency | | |
| | Gaucher's disease | GBA | 2629 |
| Disorders of | Acute intermittent porphyria | HMBS | 3145 |
| porphyrin | Gunther disease | UROS | 7390 |
| metabolism | Porphyria cutanea tarda | UROD | 7389 |
| | Hepatoerythropoietic | UROD | 7389 |
| | porphyria | | |
| | Hereditary coproporphyria | CPDX | 1371 |
| | Variegate porphyria | PPDX | 5498 |
| | Erythropoietic | FECH | 2235 |
| | protoporphyria | | |
| | Aminolevulinic acid | ALAD | 210 |
| | dehydratase deficiency | | |
| | porphyria | | |
| Lysosomal | Farber disease | ASAH1 | 427 |
| storage | Krabbe disease | GALC | 2581 |
| disorders | Galactosialidosis | CTSA | 5476 |
| | Fabry disease | GLA | 2717 |
| | Schindler disease | NAGA | 4668 |
| | GM1 gangliosidosis | GLB1 | 2720 |
| | Tay-Sachs disease | HEXA | 3073 |
| | Sandhoff disease | HEXB | 3074 |
| | GM2-gangliosidosis, AB | GM2A | 2760 |
| | variant | | |
| | Niemann-Pick disease | SMPD1, NPC1, | 6609, 4864, |
| | | NPC2 | 10577 |
| | Metachromatic | ARSA, PSAP | 410, 5660 |
| | leukodystrophy | | |
| | Multiple sulfatase deficiency | SUMF1 | 285362 |
| | Hurler syndrome | IDUA | 3425 |
| | Hunter syndrome | IDS | 3423 |
| | Sanfilippo syndrome | SGSH, | 6448, 4669, |
| | | NAGLU, | 138050, 2799 |
| | | HGSNAT, | |
| | | GNS | |
| | Morquio syndrome | GALNS, GLB1 | 2588, 2720 |
| | Maroteaux-Lamy syndrome | ARSB | 411 |
| | Sly syndrome | GUSB | 2990 |
| | Sialidosis | NEU1, NEU2, | 4758, 4759, |
| | | NEU3, NEU4 | 10825, |
| | | | 129807 |
| | I-cell disease | GNPTAB, | 79158, 84572 |
| | | GNPTG | |
| | Mucolipidosis type IV | MCOLN1 | 57192 |
| | Infantile neuronal ceroid | PPT1, PPT2 | 5538, 9374 |
| | lipofuscinosis | | |
| | Jansky-Bielschowsky | TPP1 | 1200 |
| | disease | | |
| | Batten disease | CLN1, CLN2, | 5538, 1200, |
| | | CLN3, CLN5, | 1201, 1203, |
| | | CLN6, MFSD8, | 54982, |
| | | CLN8, CTSD | 256471, 2055, |
| | | | 1509 |
| | Kufs disease, Type A | CLN6, PPT1 | 54982, 5538 |
| | Kufs disease, Type B | DNAJC5, | 80331, 8722 |
| | | CTSF | |
| | Alpha-mannosidosis | MAN2B1, | 4125, 23324, |
| | | MAN2B2, | 4123 |
| | | MAN2C1 | |
| | Beta-mannosidosis | MANBA | 4226 |
| | Fucosidosis | FUCA1 | 2517 |
| | Cystinosis | CTNS | 1497 |
| | Pycnodysostosis | CTSK | 1513 |
| | Salla disease | SLC17A5 | 26503 |
| | Infantile free sialic acid | SLC17A5 | 26503 |
| | storage disease | | |
| | Danon disease | LAMP2 | 3920 |
| Peroxisome | Zellweger syndrome | PEX1, PEX2, | 5189, 5828, |
| biogenesis | | PEX3, PEX5, | 8504, 5830, |
| disorders | | PEX6, PEX12, | 5190, 5193, |
| | | PEX14, PEX26 | 5195, 55670 |
| | Infantile Refsum disease | PEX1, PEX2, | 5189, 5828, |
| | | PEX26 | 55670 |
| | Neonatal | PEX5, PEX1, | 5830, 5189, |
| | adrenoleukodystrophy | PEX10, | 5192, 5194, |
| | | PEX13, PEX26 | 55670 |
| | RCDP Type 1 | PEX7 | 5191 |
| | Pipecolic acidemia | PAHX | 5264 |
| | Acatalasia | CAT | 847 |
| | Hyperoxaluria type 1 | AGXT | 189 |
| | Acyl-CoA oxidase | ACOX1 | 51 |
| | deficiency | | |
| | D-bifunctional protein | HSD17B4 | 3295 |
| | deficiency | | |
| | Dihydroxyacetonephosphate | GNPAT | 8443 |
| | acyltransferase deficiency | | |
| | X-linked | ABCD1 | 215 |
| | adrenoleukodystrophy | | |
| | α-Methylacyl-CoA racemase | AMACR | 23600 |
| | deficiency | | |
| | RCDP Type 2 | DHAPAT | 8443 |
| | RCDP Type 3 | AGPS | 8540 |
| | Adult Refsum disease-1 | PHYH | 5264 |
| | Mulibrey nanism | TRIM37 | 4591 |
| Disorders of | Lesch-Nyhan syndrome | HPRT | 3251 |
| purine or | Adenine | APRT | 353 |
| pyrimidine | phosphoribosyltransferase | | |
| metabolism | deficiency | | |
| | Adenosine deaminase | ADA | 100 |
| | deficiency | | |
| | Adenosine monophosphate | AMPD1 | 270 |
| | deaminase deficiency type 1 | | |
| | Adenylosuccinate lyase | ADSL | 158 |
| | deficiency | | |
| | Dihydropyrimidine | DPYD | 1806 |
| | dehydrogenase deficiency | | |
| | Miller syndrome | DHODH | 1723 |
| | Orotic aciduria | UMPS | 7372 |
| | Purine nucleoside | PNP | 4860 |
| | phosphorylase deficiency | | |
| | Xanthinuria | XDH, MOCS1, | 7498, 4337, |
| | | MOCS2, GEPH | 4338, 10243 |

[0501] The Entrez entries listed in the table above are hereby incorporated by reference in their entireties.

[0502] Additional illustrative targets of the present invention include the cosmetic targets listed in Table 6 of International Patent Publication No. WO 2013/151671, the contents of which are hereby incorporated by reference in their entirety.

[0503] Further, in some embodiments, the present methods and compositions find use in targeting any of the proteins or in treatment of any of the diseases or disorders of Table 3A, Table 3B, and/or Table 3C. In various embodiments, the present invention contemplates the targeting of the full-length and/or truncated forms of any of the proteins disclosed in Table 3B. In various embodiments, the present invention contemplates the targeting of the precursor forms and/or mature forms and/or isoforms of any of the proteins disclosed in Table 3A, Table 3B, and/or Table 3C.

[0504] In various embodiments, the present invention contemplates the targeting of a protein having about 60% (e.g. about 60%, or about 61%, or about 62%, or about 63%, or about 64%, or about 65%, or about 66%, or about 67%, or about 68%, or about 69%, or about 70%, or about 71%, or about 72%, or about 73%, or about 74%, or about 75%, or about 76%, or about 77%, or about 78%, or about 79%, or about 80%, or about 81%, or about 82%, or about 83%, or about 84%, or about 85%, or about 86%, or about 87%, or about 88%, or about 89%, or about 90%, or about 91%, or about 92%, or about 93%, or about 94%, or about 95%, or about 96%, or about 97%, or about 98%, or about 99%) sequence identity with any of the protein sequences disclosed herein (e.g. in Table 3A, Table 3B, and/or Table 3C).

[0505] In various embodiments, the present invention contemplates the targeting of a protein comprising an amino acid sequence having one or more amino acid mutations relative to any of the protein sequences described herein (e.g. in Table 3A, Table 3B, and/or Table 3C). For example, the present invention contemplates the targeting of a protein comprising an amino acid sequence having 1, or 2, or 3, or 4, or 5, or 6, or 7, or 8, or 9, or 10, or 11, or 12 amino acid mutations relative to any of the protein sequences described herein (e.g. in Table 3A, Table 3B, and/or Table 3C). In some embodiments, the one or more amino acid mutations may be independently selected from substitutions, insertions, deletions, and truncations.

[0506] In some embodiments, the amino acid mutations are amino acid substitutions, and may include conservative and/or non-conservative substitutions.

[0507] “Conservative substitutions” may be made, for instance, on the basis of similarity in polarity, charge, size, solubility, hydrophobicity, hydrophilicity, and/or the amphipathic nature of the amino acid residues involved. The 20 naturally occurring amino acids can be grouped into the following six standard amino acid groups: (1) hydrophobic: Met, Ala, Val, Leu, Ile; (2) neutral hydrophilic: Cys, Ser, Thr; Asn, Gln; (3) acidic: Asp, Glu; (4) basic: His, Lys, Arg; (5) residues that influence chain orientation: Gly, Pro; and (6) aromatic: Trp, Tyr, Phe.

[0508] As used herein, “conservative substitutions” are defined as exchanges of an amino acid by another amino acid listed within the same group of the six standard amino acid groups shown above. For example, the exchange of Asp by Glu retains one negative charge in the so modified polypeptide. In addition, glycine and proline may be substituted for one another based on their ability to disrupt α-helices.

[0509] As used herein, “non-conservative substitutions” are defined as exchanges of an amino acid by another amino acid listed in a different group of the six standard amino acid groups (1) to (6) shown above.

[0510] In various embodiments, the substitutions may also include non-classical amino acids (e.g. selenocysteine, pyrrolysine, N-formylmethionine β-alanine, GABA and 6-Aminolevulinic acid, 4-aminobenzoic acid (PABA), D-isomers of the common amino acids, 2,4-diaminobutyric acid, α-amino isobutyric acid, 4-aminobutyric acid, Abu, 2-amino butyric acid, γ-Abu, ε-Ahx, 6-amino hexanoic acid, Aib, 2-amino isobutyric acid, 3-amino propionic acid, ornithine, norleucine, norvaline, hydroxyproline, sarcosme, citrulline, homocitrulline, cysteic acid, t-butylglycine, t-butylalanine, phenylglycine, cyclohexylalanine, β-alanine, fluoro-amino acids, designer amino acids such as β methyl amino acids, C α-methyl amino acids, N α-methyl amino acids, and amino acid analogs in general).

[0511] In various embodiments, the nucleic acid drug, including synthetic RNA, is administered is a manner that it effects one or more of keratinocytes and fibroblasts (e.g. causes these cells to express one or more therapeutic proteins). For example, present methods allow for methods in which a patient's cells are used to generate a therapeutic protein and the levels of such protein are tailored by synthetic RNA dosing.

[0512] The dose of a nucleic acid drug is disclosed herein. In general, the dose of any additional agent that is useful is known to those in the art. For example, doses may be determined with reference Physicians' Desk Reference, 66th Edition, PDR Network; 2012 Edition (Dec. 27, 2011), the contents of which are incorporated by reference in its entirety. In some embodiments, the present invention allows a patient to receive doses that exceed those determined with reference Physicians' Desk Reference. The dosage of any additional agent described herein can depend on several factors including the severity of the condition, whether the condition is to be treated or prevented, and the age, weight, and health of the human patient to be treated. Additionally, pharmacogenomic (the effect of genotype on the pharmacokinetic, pharmacodynamic or efficacy profile of a therapeutic) information about a particular human patient may affect dosage used. Furthermore, the exact individual dosages can be adjusted somewhat depending on a variety of factors, including the specific combination of the agents being administered, the time of administration, the route of administration, the nature of the formulation, the rate of excretion, the particular disease being treated, the severity of the disorder, and the anatomical location of the disorder. Some variations in the dosage can be expected.

[0513] Cells, tissues, organs, and organisms, including, but not limited to, humans, have several characteristics that can inhibit or prevent the delivery of nucleic acids, including, for example, the stratum corneum, which can serve as a barrier to foreign organisms and nucleic acids. These characteristics can thus inhibit the effects of therapeutics and cosmetics comprising nucleic acids. It has now been discovered that many of these characteristics can be circumvented or overcome using a patch comprising a flexible membrane and a plurality of needles, and that such a patch can serve as an effective and safe article for the delivery of nucleic acids. Certain embodiments are therefore directed to a nucleic acid delivery patch. In one embodiment, the nucleic acid delivery patch comprises a flexible membrane. In another embodiment, the nucleic acid delivery patch comprises a plurality of needles. In yet another embodiment, the plurality of needles is attached to the flexible membrane. In some embodiments, the patch comprises a nucleic acid. In one embodiment, the nucleic acid is present in solution. In one embodiment, the plurality of needles includes one or more needles having a lumen. In another embodiment, the patch further comprises a second flexible membrane. In yet another embodiment, the flexible membrane and the second flexible membrane are arranged to form a cavity. In a further embodiment, the cavity contains a nucleic acid. In a still further embodiment, the membrane comprises one or more holes through which a nucleic acid can pass. In a still further embodiment, one or more holes and one or more needles having a lumen are arranged to allow the passage of a solution containing a nucleic acid through at least one of the one or more holes and through at least one of the one or more needles having a lumen. In some embodiments, the patch is configured to deliver a solution to the skin. In one embodiment, the solution comprises a nucleic acid. In another embodiment, the solution comprises a vehicle. In yet another embodiment, the vehicle is a lipid or lipidoid. In a still further embodiment, the vehicle is a lipid-based transfection reagent.

[0514] The cell membrane can serve as a barrier to foreign nucleic acids. It has now been discovered that combining the patch of the present invention with an electric field can increase the efficiency of nucleic acid delivery. Certain embodiments are therefore directed to a nucleic acid delivery patch comprising a plurality of needles, wherein at least two needles form part of a high-voltage circuit. Certain embodiments are directed to an implantable “tattoo” for microneedle delivery (see, e.g. Nature Materials 12, pp 367-376 (2013), the contents of which are hereby incorporated by reference in their entirety). In one embodiment, the high-voltage circuit generates a voltage greater than about 10V. In another embodiment, the high-voltage circuit generates a voltage greater than about 20V. In yet another embodiment, an electric field is produced between two of the needles. In a further embodiment, the magnitude of the electric field is at least about 100V/cm. In a still further embodiment, the magnitude of the electric field is at least about 200V/cm. In some embodiments, the patch is configured to deliver a nucleic acid to the epidermis. In other embodiments, the patch is configured to deliver a nucleic acid to the dermis. In still other embodiments, the patch is configured to deliver a nucleic acid to sub-dermal tissue. In still other embodiments, the patch is configured to deliver a nucleic acid to muscle. Certain embodiments are directed to a nucleic acid delivery patch comprising a plurality of electrodes. In one embodiment, the plurality of electrodes is attached to a flexible membrane. Other embodiments are directed to a nucleic acid delivery patch comprising a rigid structure. In one embodiment, a plurality of electrodes is attached to the rigid structure.

[0515] In some embodiments, the compositions described herein are administered using an array of needles covering an affected area of the subject. In some embodiments, the treatment area is mechanically massaged after administration. In some embodiments, the treatment area is exposed to electric pulses after administration. In some embodiments, the electric pulses are between about 10V and about 200V for from about 50 microseconds to about 1 second. In some embodiments, the electric pulses are generated around the treatment area by a multielectrode array.

[0516] In some embodiments, the present invention provides a patch delivery system, comprising a non-viral RNA transfection composition enclosed within a membrane, and an array of delivery needles delivering from about 10 ng to about 2000 ng of RNA per treatment area of about 100 cm² or less, or about 50 cm² or less, or about 10 cm² or less, or about 5 cm² or less, or about 1 cm² or less, or about 0.5 cm² or less, or about 0.2 cm² or less. In some embodiments, the non-viral transfection composition contains from about 10 ng to about 2000 ng per injection volume of about 20 μL to about 1 ml. In some embodiments, each needle delivers an injection volume of between 1 μL and 500 μL.

[0517] In some embodiments, the delivery patch comprises an acrylic reservoir that holds the nucleic acid drug. In some embodiments, a silicon adhesive is added to create a semisolid suspension of microscopic, concentrated drug cells. Further, some embodiments pride a patch that is associated with one or more enhancers (these include, without limitation, iontophoresis, ultrasound, chemicals including gels, microneedles, sonophoresis, lasers, and electroporatic methods).

[0518] In some embodiments, the delivery is effected via a gel, optionally a hydro alcoholic gel containing a combination of enhancers (e.g. COMBIGEL (ANTARES PHARMA)).

[0519] In various embodiments, the RNA is delivered using needle arrays. Illustrative needle arrays include, but are not limited to AdminPen 600 and those described in U.S. Pat. Nos. 7,658,728, 7,785,301, and 8,414,548, the entire disclosure of which are hereby incorporated by reference. Other examples of needles include, for example, the 3M™ Hollow Microstructured Transdermal System and the 3M Solid Microstructured Transdermal Systems (sMTS). See, e.g. U.S. Pat. Nos. 3,034,507 and 3,675,766; Microneedles for Transdermal Drug Delivery. Advanced Drug Delivery Reviews. 56: 581-587 (2004); Pharm Res. 2011 January; 28(1): 31-40, the entire contents of which are hereby incorporated by reference in their entireties.

[0520] In some embodiments, microneedles and/or microneedle arrays may be used. In various embodiments, the microneedles and/or microneedle arrays may be, without limitation, solid, RNA-coated, dissolving, biodegradable, and/or hollow. In some embodiments, the delivery is effected via a microneedle system, optionally combined with an electronically controlled micropump that delivers the drug at specific times or upon demand. For example, the MACROFLUX (Alza) system may be used.

[0521] In another embodiment, the method further comprises contacting the cell with one or more nucleic acid molecules. In yet another embodiment, at least one of the one or more nucleic acid molecules encodes a protein of interest. In a further embodiment, the method results in the cell expressing the protein of interest. In a still further embodiment, the method results in the cell expressing a therapeutically or cosmetically effective amount of the protein of interest.

[0522] In another embodiment, the cell is contacted with a nucleic acid molecule. In yet another embodiment, the method results in the cell internalizing the nucleic acid molecule. In a further embodiment, the method results in the cell internalizing a therapeutically or cosmetically effective amount of the nucleic acid molecule. In one embodiment, the nucleic acid encodes a protein of interest. In one embodiment, the nucleic acid molecule comprises a member of the group: a dsDNA molecule, a ssDNA molecule, a RNA molecule, a dsRNA molecule, a ssRNA molecule, a plasmid, an oligonucleotide, a synthetic RNA molecule, a miRNA molecule, an mRNA molecule, and an siRNA molecule. In various embodiments, the RNA comprises one or more non-canonical nucleotides.

[0523] In some embodiments, the present invention relates to one or more administration techniques described in U.S. Pat. Nos. 5,711,964; 5,891,468; 6,316,260; 6,413,544; 6,770,291; and 7,390,780, the entire contents of which are hereby incorporated by reference in their entireties.

[0524] The invention also provides kits that can simplify the administration of the nucleic acid drugs described herein and/or any additional agent described herein. An illustrative kit of the invention comprises a nucleic acid drug and/or any additional agent described herein in unit dosage form. In one embodiment, the unit dosage form is a container, such as a pre-filled syringe, which can be sterile, containing any agent described herein and a pharmaceutically acceptable carrier, diluent, excipient, or vehicle. The kit can further comprise a label or printed instructions instructing the use of any agent described herein. The kit or one or more components of the kit may be stored at room temperature, about 4° C., about −20° C., about −80° C., or about −196° C. The kit may also include a lid speculum, topical anesthetic, and a cleaning agent for the administration location. The kit can also further comprise one or more additional agent described herein. In one embodiment, the kit comprises a container containing an effective amount of a nucleic acid drug as disclosed herein and an effective amount of another composition, such as an additional agent as described herein. In some embodiments, the unit dosage form is a pre-loaded (a.k.a. pre-dosed or pre-filled) syringe or a pen needle injector (injection pen)). Such unit dosage forms may comprise the effective doses of nucleic acid drug described herein, e.g. about 10 ng to about 2000 ng, e.g. about 10 ng, or about 20 ng, or about 50 ng, or about 100 ng, or about 200 ng, or about 300 ng, or about 400 ng, or about 500 ng, or about 600 ng, or about 700 ng, or about 800 ng, or about 900 ng, or about 1000 ng, or about 1100 ng, or about 1200 ng, or about 1300 ng, or about 1400 ng, or about 1500 ng, or about 1600 ng, or about 1700 ng, or about 1800 ng, or about 1900 ng, or about 2000 ng, or about 3000 ng, or about 4000 ng, or about 5000 ng.

[0525] Some embodiments are directed to synthetic RNA molecules with low toxicity and high translation efficiency. Other embodiments are directed to a cell-culture medium for high-efficiency in vivo transfection, reprogramming, and gene editing of cells. Other embodiments pertain to methods for producing synthetic RNA molecules encoding reprogramming proteins. Still further embodiments pertain to methods for producing synthetic RNA molecules encoding gene-editing proteins.

[0526] Some embodiments are directed to methods of gene-editing and/or gene correction. Some embodiments encompass synthetic RNA-based gene-editing and/or gene correction, e.g. with RNA comprising non-canonical nucleotides, e.g. RNA encoding one or more of a nuclease, a transcription activator-like effector nuclease (TALEN), a zinc-finger nuclease, a meganuclease, a nickase, a clustered regularly interspaced short palindromic repeat (CRISPR)-associated protein a DNA-repair protein, a DNA-modification protein, a base-modification protein, a DNA methyltransferase, an protein that causes DNA demethylation, an enzyme for which DNA is a substrate or a natural or engineered variant, family-member, orthologue, fragment or fusion construct thereof. In some embodiments, the efficiency of the gene-editing and/or gene correction is high, for example, higher than DNA-based gene editing and/or gene correction. In some embodiments, the present methods of gene-editing and/or gene correction are efficient enough for in vivo application. In some embodiments, the present methods of gene-editing and/or gene correction are efficient enough to not require cellular selection (e.g. selection of cells that have been edited). In various embodiments, the efficiency of gene-editing of the present methods is about 1%, or about 2%, or about 3%, or about 4%, or about 5%, or about 6%, or about 7%, or about 8%, or about 9%, or about 10%, or about 20%, or about 30%, or about 40%, or about 50%, or about 60%, or about 70%, or about 80%, or about 90%, or about 100%. In various embodiments, the efficiency of gene-correction of the present methods is about 1%, or about 2%, or about 3%, or about 4%, or about 5%, or about 6%, or about 7%, or about 8%, or about 9%, or about 10%, or about 20%, or about 30%, or about 40%, or about 50%, or about 60%, or about 70%, or about 80%, or about 90%, or about 100%

[0527] Some embodiments are directed to high-efficiency gene-editing proteins comprising engineered nuclease cleavage or DNA-modification domains. Other embodiments are directed to high-fidelity gene-editing proteins comprising engineered nuclease cleavage or DNA-modification domains. Various embodiments are directed to high-efficiency gene-editing proteins comprising engineered DNA-binding domains. Other embodiments are directed to high-fidelity gene-editing proteins comprising engineered DNA-binding domains. Still other embodiments are directed to gene-editing proteins comprising engineered repeat sequences. Some embodiments are directed to gene-editing proteins comprising one or more CRISPR associated family members. Some embodiments are directed to methods for altering the DNA sequence of a cell by transfecting the cell with or inducing the cell to express a gene-editing protein. Other embodiments are directed to methods for altering the DNA sequence of a cell that is present in an in vitro culture. Still further embodiments are directed to methods for altering the DNA sequence of a cell that is present in vivo.

[0528] It has been further discovered that in certain situations, including one or more steroids and/or one or more antioxidants in the transfection medium can increase in vivo transfection efficiency, in vivo reprogramming efficiency, and in vivo gene-editing efficiency. Certain embodiments are therefore directed to contacting a cell or patient with a glucocorticoid, such as hydrocortisone, prednisone, prednisolone, methylprednisolone, dexamethasone or betamethasone. Other embodiments are directed to a method for inducing a cell to express a protein of interest by contacting a cell with a medium containing a steroid and contacting the cell with one or more nucleic acid molecules. In one embodiment, the nucleic acid molecule comprises synthetic RNA. In another embodiment, the steroid is hydrocortisone. In yet another embodiment, the hydrocortisone is present in the medium at a concentration of between about 0.1 uM and about 10 uM, or about 1 uM. Other embodiments are directed to a method for inducing a cell in vivo to express a protein of interest by contacting the cell with a medium containing an antioxidant and contacting the cell with one or more nucleic acid molecules. In one embodiment, the antioxidant is ascorbic acid or ascorbic-acid-2-phosphate. In another embodiment, the ascorbic acid or ascorbic-acid-2-phosphate is present in the medium at a concentration of between about 0.5 mg/L and about 500 mg/L, including about 50 mg/L. Still other embodiments are directed to a method for reprogramming and/or gene-editing a cell in vivo by contacting the cell with a medium containing a steroid and/or an antioxidant and contacting the cell with one or more nucleic acid molecules, wherein the one or more nucleic acid molecules encodes one or more reprogramming and/or gene-editing proteins. In certain embodiments, the cell is present in an organism, and the steroid and/or antioxidant are delivered to the organism.

[0529] Adding transferrin to the complexation medium has been reported to increase the efficiency of plasmid transfection in certain situations. It has now been discovered that adding transferrin to the complexation medium can also increase the efficiency of in vivo transfection with synthetic RNA molecules. Certain embodiments are therefore directed to a method for inducing a cell in vivo to express a protein of interest by adding one or more synthetic RNA molecules and a transfection reagent to a solution containing transferrin. In one embodiment, the transferrin is present in the solution at a concentration of between about 1 mg/L and about 100 mg/L, such as about 5 mg/L. In another embodiment, the transferrin is recombinant.

[0530] In certain situations, including pertaining to culturing, it may be desirable to replace animal-derived components with non-animal-derived and/or recombinant components, in part because non-animal-derived and/or recombinant components can be produced with a higher degree of consistency than animal-derived components, and in part because non-animal-derived and/or recombinant components carry less risk of contamination with toxic and/or pathogenic substances than do animal-derived components. Certain embodiments are therefore directed to a protein that is non-animal-derived and/or recombinant. Other embodiments are directed to a medium, wherein some or all of the components of the medium are non-animal-derived and/or recombinant.

[0531] Other embodiments are directed to a method for transfecting a cell in vivo. In one embodiment, a cell in vivo is transfected with one or more nucleic acids, and the transfection is performed using a transfection reagent, such as a lipid-based transfection reagent. In one embodiment, the one or more nucleic acids includes at least one RNA molecule. In another embodiment, the cell is transfected repeatedly, such as at least about 2 times during about 10 consecutive days, or at least about 3 times during about 7 consecutive days, or at least about 4 times during about 6 consecutive days. Some embodiments are directed to a method for increasing expression of telomerase in one of a fibroblast, a hematopoietic stem cell, a mesenchymal stem cells, a cardiac stem cell, a hair follicle stem cell, a neural stem cell, an intestinal stem cell, an endothelial stem cell, an olfactory stem cell, a neural crest stem cell, a testicular cell, and a keratinocyte. Some embodiments are directed to a method for increasing the length of telomeres in one of a fibroblast, a hematopoietic stem cell, a mesenchymal stem cells, a cardiac stem cell, a hair follicle stem cell, a neural stem cell, an intestinal stem cell, an endothelial stem cell, an olfactory stem cell, a neural crest stem cell, a testicular cell, and a keratinocyte. Other embodiments are directed to a method for isolating a cell from a patient, contacting the cell with a nucleic acid drug encoding a component of telomerase (e.g., TERT), and reintroducing the cell to the patient. Various embodiments are directed to a method for increasing the replicative potential of a cell.

[0532] Reprogramming

[0533] Cells can be reprogrammed by exposing them to specific extracellular cues and/or by ectopic expression of specific proteins, microRNAs, etc. While several reprogramming methods have been previously described, most that rely on ectopic expression require the introduction of exogenous DNA, which can carry mutation risks. DNA-free reprogramming methods based on direct delivery of reprogramming proteins have been reported. However, these methods are too inefficient and unreliable for commercial use. In addition, RNA-based reprogramming methods have been described (see, e.g., Angel. MIT Thesis. 2008. 1-56; Angel et al. PLoS ONE. 2010. 5,107; Warren et al. Cell Stem Cell. 2010. 7,618-630; Angel. MIT Thesis. 2011. 1-89; and Lee et al., Cell. 2012. 151,547-558; the contents of all of which are hereby incorporated by reference). However, existing RNA-based reprogramming methods are slow, unreliable, and inefficient when performed on adult cells, require many transfections (resulting in significant expense and opportunity for error), can reprogram only a limited number of cell types, can reprogram cells to only a limited number of cell types, require the use of immunosuppressants, and require the use of multiple human-derived components, including blood-derived HSA and human fibroblast feeders. The many drawbacks of previously disclosed RNA-based reprogramming methods make them undesirable for research, therapeutic or cosmetic use.

[0534] Reprogramming can be performed by transfecting cells with one or more nucleic acids encoding one or more reprogramming factors. Examples of reprogramming factors include, but are not limited to Oct4 protein, Sox2 protein, Klf4 protein, c-Myc protein, I-Myc protein, TERT protein, Nanog protein, Lin28 protein, Utf1 protein, Aicda protein, miR200 micro-RNA, miR302 micro-RNA, miR367 micro-RNA, miR369 micro-RNA and biologically active fragments, analogues, variants and family-members thereof. Certain embodiments are therefore directed to a method for reprogramming a cell in vivo. In one embodiment, the cell in vivo is reprogrammed by transfecting the cell with one or more nucleic acids encoding one or more reprogramming factors. In one embodiment, the one or more nucleic acids includes an RNA molecule that encodes Oct4 protein. In another embodiment, the one or more nucleic acids also includes one or more RNA molecules that encodes Sox2 protein, Klf4 protein, and c-Myc protein. In yet another embodiment, the one or more nucleic acids also includes an RNA molecule that encodes Lin28 protein. In one embodiment, the cell is a human skin cell, and the human skin cell is reprogrammed to a pluripotent stem cell. In another embodiment, the cell is a human skin cell, and the human skin cell is reprogrammed to a glucose-responsive insulin-producing cell. Examples of other cells that can be reprogrammed and other cells to which a cell can be reprogrammed include, but are not limited to skin cells, pluripotent stem cells, mesenchymal stem cells, β-cells, retinal pigmented epithelial cells, hematopoietic cells, cardiac cells, airway epithelial cells, neural stem cells, neurons, glial cells, bone cells, blood cells, and dental pulp stem cells. In one embodiment, the cell is contacted with a medium that supports the reprogrammed cell. In one embodiment, the medium also supports the cell.

[0535] Importantly, infecting skin cells with viruses encoding Oct4, Sox2, Klf4, and c-Myc, combined with culturing the cells in a medium that supports the growth of cardiomyocytes, has been reported to cause reprogramming of the skin cells to cardiomyocytes, without first reprogramming the skin cells to pluripotent stem cells (See Efs et al Nat Cell Biol. 2011; 13:215-22, the contents of which are hereby incorporated by reference). In certain situations, direct reprogramming (reprogramming one somatic cell to another somatic cell without first reprogramming the somatic cell to a pluripotent stem cell, also known as “transdifferentiation”) may be desirable, in part because culturing pluripotent stem cells can be time-consuming and expensive, the additional handling involved in establishing and characterizing a stable pluripotent stem cell line can carry an increased risk of contamination, and the additional time in culture associated with first producing pluripotent stem cells can carry an increased risk of genomic instability and the acquisition of mutations, including point mutations, copy-number variations, and karyotypic abnormalities. Certain embodiments are therefore directed to a method for reprogramming a somatic cell in vivo, wherein the cell is reprogrammed to a somatic cell, and wherein a characterized pluripotent stem-cell line is not produced.

[0536] It has been further discovered that, in certain situations, fewer total transfections may be required to reprogram a cell according to the methods of the present invention than according to other methods. Certain embodiments are therefore directed to a method for reprogramming a cell in vivo, wherein between about 1 and about 12 transfections are performed during about 20 consecutive days, or between about 4 and about 10 transfections are performed during about 15 consecutive days, or between about 4 and about 8 transfections are performed during about 10 consecutive days. It is recognized that when a cell is contacted with a medium containing nucleic acid molecules, the cell may likely come into contact with and/or internalize more than one nucleic acid molecule either simultaneously or at different times. A cell can therefore be contacted with a nucleic acid more than once, e.g. repeatedly, even when a cell is contacted only once with a medium containing nucleic acids.

[0537] Of note, nucleic acids can contain one or more non-canonical or “modified” residues as described herein. For instance, any of the non-canonical nucleotides described herein can be used in the present reprogramming methods. In one embodiment, pseudouridine-5′-triphosphate can be substituted for uridine-5′-triphosphate in an in vitro-transcription reaction to yield synthetic RNA, wherein up to 100% of the uridine residues of the synthetic RNA may be replaced with pseudouridine residues. In vitro-transcription can yield RNA with residual immunogenicity, even when pseudouridine and 5-methylcytidine are completely substituted for uridine and cytidine, respectively (see, e.g., Angel. Reprogramming Human Somatic Cells to Pluripotency Using RNA [Doctoral Thesis]. Cambridge, Mass.: MIT; 2011, the contents of which are hereby incorporated by reference). For this reason, it is common to add an immunosuppressant to the transfection medium when transfecting cells with RNA. In certain situations, adding an immunosuppressant to the transfection medium may not be desirable, in part because the recombinant immunosuppressant most commonly used for this purpose, B18R, can be expensive and difficult to manufacture. It has now been discovered that cells in vivo can be transfected and/or reprogrammed according to the methods of the present invention, without using B18R or any other immunosuppressant. It has been further discovered that reprogramming cells in vivo according to the methods of the present invention without using immunosuppressants can be rapid, efficient, and reliable. Certain embodiments are therefore directed to a method for transfecting a cell in vivo, wherein the transfection medium does not contain an immunosuppressant. Other embodiments are directed to a method for reprogramming a cell in vivo, wherein the transfection medium does not contain an immunosuppressant. In certain situations, for example when using a high cell density, it may be beneficial to add an immunosuppressant to the transfection medium. Certain embodiments are therefore directed to a method for transfecting a cell in vivo, wherein the transfection medium contains an immunosuppressant. Other embodiments are directed to a method for reprogramming a cell in vivo, wherein the transfection medium contains an immunosuppressant. In one embodiment, the immunosuppressant is B18R or a biologically active fragment, analogue, variant or family-member thereof or dexamethasone or a derivative thereof. In one embodiment, the transfection medium does not contain an immunosuppressant, and the nucleic-acid dose is chosen to prevent excessive toxicity. In another embodiment, the nucleic-acid dose is less than about 1 mg/cm² of tissue or less than about 1 mg/100,000 cells or less than about 10 mg/kg.

[0538] Reprogrammed cells produced according to certain embodiments of the present invention are suitable for therapeutic and/or cosmetic applications as they do not contain undesirable exogenous DNA sequences, and they are not exposed to animal-derived or human-derived products, which may be undefined, and which may contain toxic and/or pathogenic contaminants. Furthermore, the high speed, efficiency, and reliability of certain embodiments of the present invention may reduce the risk of acquisition and accumulation of mutations and other chromosomal abnormalities. Certain embodiments of the present invention can thus be used to generate cells that have a safety profile adequate for use in therapeutic and/or cosmetic applications. For example, reprogramming cells using RNA and the medium of the present invention, wherein the medium does not contain animal or human-derived components, can yield cells that have not been exposed to allogeneic material. Certain embodiments are therefore directed to a reprogrammed cell that has a desirable safety profile. In one embodiment, the reprogrammed cell has a normal karyotype. In another embodiment, the reprogrammed cell has fewer than about 5 copy-number variations (CNVs) relative to the patient genome, such as fewer than about 3 copy-number variations relative to the patient genome, or no copy-number variations relative to the patient genome. In yet another embodiment, the reprogrammed cell has a normal karyotype and fewer than about 100 single nucleotide variants in coding regions relative to the patient genome, or fewer than about 50 single nucleotide variants in coding regions relative to the patient genome, or fewer than about 10 single nucleotide variants in coding regions relative to the patient genome.

[0539] Endotoxins and nucleases can co-purify and/or become associated with other proteins, such as serum albumin. Recombinant proteins, in particular, can often have high levels of associated endotoxins and nucleases, due in part to the lysis of cells that can take place during their production. Endotoxins and nucleases can be reduced, removed, replaced or otherwise inactivated by many of the methods of the present invention, including, for example, by acetylation, by addition of a stabilizer such as sodium octanoate, followed by heat treatment, by the addition of nuclease inhibitors to the albumin solution and/or medium, by crystallization, by contacting with one or more ion-exchange resins, by contacting with charcoal, by preparative electrophoresis or by affinity chromatography. It has now been discovered that partially or completely reducing, removing, replacing, or otherwise inactivating endotoxins and/or nucleases from a medium and/or from one or more components of a medium can increase the efficiency with which cells can be transfected and reprogrammed. Certain embodiments are therefore directed to a method for transfecting a cell in vivo with one or more nucleic acids, wherein the transfection medium is treated to partially or completely reduce, remove, replace or otherwise inactivate one or more endotoxins and/or nucleases. Other embodiments are directed to a medium that causes minimal degradation of nucleic acids. In one embodiment, the medium contains less than about 1 EU/mL, or less than about 0.1 EU/mL, or less than about 0.01 EU/mL.

[0540] In certain situations, protein-based lipid carriers such as serum albumin can be replaced with non-protein-based lipid carriers such as methyl-beta-cyclodextrin. The medium of the present invention can also be used without a lipid carrier, for example, when transfection is performed using a method that may not require or may not benefit from the presence of a lipid carrier, for example, using one or more lipid-based transfection reagents, polymer-based transfection reagents or peptide-based transfection reagents or using electroporation. Many protein-associated molecules, such as metals, can be highly toxic to cells in vivo. This toxicity can cause decreased viability, as well as the acquisition of mutations. Certain embodiments thus have the additional benefit of producing cells that are free from toxic molecules.

[0541] The associated-molecule component of a protein can be measured by suspending the protein in solution and measuring the conductivity of the solution. Certain embodiments are therefore directed to a medium that contains a protein, wherein about a 10% solution of the protein in water has a conductivity of less than about 500 μmho/cm. In one embodiment, the solution has a conductivity of less than about 50 pmho/cm. In another embodiment, less than about 0.65% of the dry weight of the protein comprises lipids and/or less than about 0.35% of the dry weight of the protein comprises free fatty acids.

[0542] The amount of nucleic acid delivered to cells in vivo can be increased to increase the desired effect of the nucleic acid. However, increasing the amount of nucleic acid delivered to cells in vivo beyond a certain point can cause a decrease in the viability of the cells, due in part to toxicity of the transfection reagent. It has now been discovered that when a nucleic acid is delivered to a population of cells in vivo in a fixed volume (for example, cells in a region of tissue), the amount of nucleic acid delivered to each cell can depend on the total amount of nucleic acid delivered to the population of cells and to the density of the cells, with a higher cell density resulting in less nucleic acid being delivered to each cell. In certain embodiments, a cell in vivo is transfected with one or more nucleic acids more than once. Under certain conditions, for example when the cells are proliferating, the cell density may change from one transfection to the next. Certain embodiments are therefore directed to a method for transfecting a cell in vivo with a nucleic acid, wherein the cell is transfected more than once, and wherein the amount of nucleic acid delivered to the cell is different for two of the transfections. In one embodiment, the cell proliferates between two of the transfections, and the amount of nucleic acid delivered to the cell is greater for the second of the two transfections than for the first of the two transfections. In another embodiment, the cell is transfected more than twice, and the amount of nucleic acid delivered to the cell is greater for the second of three transfections than for the first of the same three transfections, and the amount of nucleic acid delivered to the cells is greater for the third of the same three transfections than for the second of the same three transfections. In yet another embodiment, the cell is transfected more than once, and the maximum amount of nucleic acid delivered to the cell during each transfection is sufficiently low to yield at least about 80% viability for at least two consecutive transfections.

[0543] It has now been discovered that modulating the amount of nucleic acid delivered to a population of proliferating cells in vivo in a series of transfections can result in both an increased effect of the nucleic acid and increased viability of the cells. It has been further discovered that, in certain situations, when cells in vivo are contacted with one or more nucleic acids encoding one or more reprogramming factors in a series of transfections, the efficiency of reprogramming can be increased when the amount of nucleic acid delivered in later transfections is greater than the amount of nucleic acid delivered in earlier transfections, for at least part of the series of transfections. Certain embodiments are therefore directed to a method for reprogramming a cell in vivo, wherein one or more nucleic acids is repeatedly delivered to the cell in a series of transfections, and the amount of the nucleic acid delivered to the cell is greater for at least one later transfection than for at least one earlier transfection. In one embodiment, the cell is transfected between about 2 and about 10 times, or between about 3 and about 8 times, or between about 4 and about 6 times. In another embodiment, the one or more nucleic acids includes at least one RNA molecule, the cell is transfected between about 2 and about 10 times, and the amount of nucleic acid delivered to the cell in each transfection is the same as or greater than the amount of nucleic acid delivered to the cell in the most recent previous transfection. In yet another embodiment, the amount of nucleic acid delivered to the cell in the first transfection is between about 20 ng/cm² and about 250 ng/cm², or between 100 ng/cm² and 600 ng/cm². In yet another embodiment, the cell is transfected about 5 times at intervals of between about 12 and about 48 hours, and the amount of nucleic acid delivered to the cell is about 25 ng/cm² for the first transfection, about 50 ng/cm² for the second transfection, about 100 ng/cm² for the third transfection, about 200 ng/cm² for the fourth transfection, and about 400 ng/cm² for the fifth transfection. In yet another embodiment, the cell is further transfected at least once after the fifth transfection, and the amount of nucleic acid delivered to the cell is about 400 ng/cm².

[0544] Certain embodiments are directed to a method for transfecting a cell in vivo with a nucleic acid, wherein the amount of nucleic acid is determined by measuring the cell density, and choosing the amount of nucleic acid to transfect based on the measurement of cell density. In one embodiment, the cell density is measured by optical means. In another embodiment, the cell is transfected repeatedly, the cell density increases between two transfections, and the amount of nucleic acid transfected is greater for the second of the two transfections than for the first of the two transfections.

[0545] It has now been discovered that, in certain situations, the amount of a circulating protein that is produced in a patient can be increased by administering to a patient a nucleic acid at a plurality of administration sites. In certain embodiments, the amount of a circulating protein is increased relative to the amount of the circulating protein that is produced in a patient by administering to the patient the nucleic acid at a single injection site. In one embodiment, the administering is by injection. In another embodiment, the injection is intradermal injection. In still another embodiment, the injection is subcutaneous or intramuscular injection. In some embodiments, the plurality of administration sites comprises administration sites in the skin. In other embodiments, the plurality of administration sites is at least about 1 or at least about 2 or at least about 5 or at least about 10 or at least about 20 or at least about 50 or at least about 100 administration sites. In one embodiment, the administering is performed within at least about 5 minutes or at least about 10 minutes or at least about 30 minutes or at least about 1 hour or at least about 2 hours or at least about 5 hours or at least about 12 hours or at least about 1 day. In certain embodiments, the amount of a circulating protein is increased by at least about 10 percent or at least about 20 percent or at least about 50 percent or at least about 100 percent or at least about 3-fold or at least about 5-fold or at least about 10-fold or at least about 20-fold or at least about 50-fold or at least about 100-fold or at least about 500-fold or at least about 1000-fold or greater than 1000-fold.

[0546] It has now been discovered that, in certain situations, the in vivo transfection efficiency and viability of cells contacted with the medium of the present invention can be improved by conditioning the medium. Certain embodiments are therefore directed to a method for conditioning a medium. Other embodiments are directed to a medium that is conditioned. In one embodiment, the feeders are fibroblasts, and the medium is conditioned for approximately 24 hours. Other embodiments are directed to a method for transfecting a cell in vivo, wherein the transfection medium is conditioned. Other embodiments are directed to a method for reprogramming and/or gene-editing a cell in vivo, wherein the medium is conditioned. In one embodiment, the feeders are mitotically inactivated, for example, by exposure to a chemical such as mitomycin-C or by exposure to gamma radiation. In certain embodiments, it may be beneficial to use only autologous materials, in part to, for example and not wishing to be bound by theory, avoid the risk of disease transmission from the feeders to the cell or the patient. Certain embodiments are therefore directed to a method for transfecting a cell in vivo, wherein the transfection medium is conditioned, and wherein the feeders are derived from the same individual as the cell being transfected. Other embodiments are directed to a method for reprogramming and/or gene-editing a cell in vivo, wherein the medium is conditioned, and wherein the feeders are derived from the same individual as the cell being reprogrammed and/or gene-edited.

[0547] Several molecules can be added to media by conditioning. Certain embodiments are therefore directed to a medium that is supplemented with one or more molecules that are present in a conditioned medium. In one embodiment, the medium is supplemented with Wnt1, Wnt2, Wnt3, Wnt3a or a biologically active fragment, analogue, variant, agonist, or family-member thereof. In another embodiment, the medium is supplemented with TGF-β or a biologically active fragment, analogue, variant, agonist, or family-member thereof. In yet another embodiment, a cell in vivo is reprogrammed according to the method of the present invention, wherein the medium is not supplemented with TGF-β for between about 1 and about 5 days, and is then supplemented with TGF-β for at least about 2 days. In yet another embodiment, the medium is supplemented with IL-6, IL-6R or a biologically active fragment, analogue, variant, agonist, or family-member thereof. In yet another embodiment, the medium is supplemented with a sphingolipid or a fatty acid. In still another embodiment, the sphingolipid is lysophosphatidic acid, lysosphingomyelin, sphingosine-1-phosphate or a biologically active analogue, variant or derivative thereof.

[0548] In addition to mitotically inactivating cells, under certain conditions, irradiation can change the gene expression of cells, causing cells to produce less of certain proteins and more of certain other proteins that non-irradiated cells, for example, members of the Wnt family of proteins. In addition, certain members of the Wnt family of proteins can promote the growth and transformation of cells. It has now been discovered that, in certain situations, the efficiency of reprogramming can be greatly increased by contacting a cell in vivo with a medium that is conditioned using irradiated feeders instead of mitomycin-c-treated feeders. It has been further discovered that the increase in reprogramming efficiency observed when using irradiated feeders is caused in part by Wnt proteins that are secreted by the feeders. Certain embodiments are therefore directed to a method for reprogramming a cell in vivo, wherein the cell is contacted with Wnt1, Wnt2, Wnt3, Wnt3a or a biologically active fragment, analogue, variant, family-member or agonist thereof, including agonists of downstream targets of Wnt proteins, and/or agents that mimic one or more of the biological effects of Wnt proteins, for example, 2-amino-4-[3,4-(methylenedioxy)benzylamino]-6-(3-methoxyphenyl)pyrimidine.

[0549] Because of the low efficiency of many DNA-based reprogramming methods, these methods may be difficult or impossible to use with cells derived from patient samples, which may contain only a small number of cells. In contrast, the high efficiency of certain embodiments of the present invention can allow reliable reprogramming of a small number of cells, including single cells. Certain embodiments are directed to a method for reprogramming a small number of cells. Other embodiments are directed to a method for reprogramming a single cell. In one embodiment, the cell is contacted with one or more enzymes. In another embodiment, the enzyme is collagenase. In yet another embodiment, the collagenase is animal-component free. In one embodiment, the collagenase is present at a concentration of between about 0.1 mg/mL and about 10 mg/mL, or between about 0.5 mg/mL and about 5 mg/mL. In another embodiment, the cell is a blood cell. In yet another embodiment, the cell is contacted with a medium containing one or more proteins that is derived from the patient's blood. In still another embodiment, the cell is contacted with a medium comprising: DMEM/F12+2 mM L-alanyl-L-glutamine+between about 5% and about 25% patient-derived serum, or between about 10% and about 20% patient-derived serum, or about 20% patient-derived serum.

[0550] It has now been discovered that, in certain situations, transfecting cells in vivo with a mixture of RNA encoding Oct4, Sox2, Klf4, and c-Myc using the medium of the present invention can cause the rate of proliferation of the cells to increase. When the amount of RNA delivered to the cells is too low to ensure that all of the cells are transfected, only a fraction of the cells may show an increased proliferation rate. In certain situations, such as when generating a personalized therapeutic, increasing the proliferation rate of cells may be desirable, in part because doing so can reduce the time necessary to generate the therapeutic, and therefore can reduce the cost of the therapeutic. Certain embodiments are therefore directed to a method for transfecting a cell in vivo with a mixture of RNA encoding Oct4, Sox2, Klf4, and c-Myc. In one embodiment, the cell exhibits an increased proliferation rate. In another embodiment, the cell is reprogrammed.

[0551] Many diseases are associated with one or more mutations. Mutations can be corrected by contacting a cell with a nucleic acid that encodes a protein that, either alone or in combination with other molecules, corrects the mutation (an example of gene-editing). Examples of such proteins include: a nuclease, a transcription activator-like effector nuclease (TALEN), a zinc-finger nuclease, a meganuclease, a nickase, a clustered regularly interspaced short palindromic repeat (CRISPR)-associated protein a DNA-repair protein, a DNA-modification protein, a base-modification protein, a DNA methyltransferase, an protein that causes DNA demethylation, an enzyme for which DNA is a substrate or a natural or engineered variant, family-member, orthologue, fragment or fusion construct thereof. Certain embodiments are therefore directed to a method for transfecting a cell in vivo with a nucleic acid, wherein the nucleic acid encodes a protein that, either alone or in combination with other molecules, creates a single-strand or double-strand break in a DNA molecule. In a one embodiment, the protein is a zinc finger nuclease or a TALEN. In another embodiment, the nucleic acid is an RNA molecule. In yet another embodiment, the single-strand or double-strand break is within about 5,000,000 bases of the transcription start site of a gene selected from the group: SERPINA1, CCR5, CXCR4, GAD1, GAD2, CFTR, HBA1, HBA2, HBB, HBD, FANCA, XPA, XPB, XPC, ERCC2, POLH, HTT, DMD, SOD1, APOE, PRNP, BRCA1, and BRCA2 or an analogue, variant or family-member thereof. In one embodiment, the present invention relates to gene-editing of the MYC protein (e.g. correcting one or more mutations that may be linked to cancer), optionally with a TALEN. In yet another embodiment, the cell is transfected with a nucleic acid that acts as a repair template by either causing the insertion of a DNA sequence in the region of the single-strand or double-strand break or by causing the DNA sequence in the region of the single-strand or double-strand break to otherwise change. In yet another embodiment, the gene-editing protein contains a DNA modification domain. In yet another embodiment, the gene-editing protein corrects a mutation without creating a single-strand break. In yet another embodiment, the gene-editing protein corrects a mutation without creating a double-strand break. In yet another embodiment, the gene-editing protein corrects a mutation by causing the replacement of one base with another base. In one embodiment, adenine is replaced by cytosine. In another embodiment, adenine is replaced by guanine. In yet another embodiment, adenine is replaced by thymine. In yet another embodiment, cytosine is replaced by adenine. In yet another embodiment, cytosine is replaced by guanine. In yet another embodiment, cytosine is replaced by thymine. In yet another embodiment, guanine is replaced by adenine. In yet another embodiment, guanine is replaced by cytosine. In yet another embodiment, guanine is replaced by thymine. In yet another embodiment, thymine is replaced by adenine. In yet another embodiment, thymine is replaced by cytosine. In yet another embodiment, thymine is replaced by guanine. In one embodiment, the replacement of one base with another base is a one-step process. In another embodiment, the replacement of one base with another base is a multi-step process. In some embodiments, one base is replaced by more than one base, for example, by two bases. In other embodiments, more than one base is replaced by one base. In still other embodiments, more than one base is replaced by more than one base. In some embodiments, the gene-editing protein contains a deaminase domain. In one embodiment, the deaminase domain comprises a cytidine deaminase domain. In another embodiment, the deaminase domain comprises an adenosine deaminase domain. In yet another embodiment, the deaminase domain comprises a guanosine deaminase domain. In yet another embodiment, the gene-editing protein comprises a sequence that is at least about 50% or at least about 60% or at least about 70% or at least about 80% or at least about 90% or at least about 95% or at least about 99% homologous to one or more of SEQ ID NOs: 587, 588, 589, 590, 591, 592, and 593. In yet another embodiment, the gene-editing protein comprises a linker. In one embodiment, the linker is a flexible linker. In another embodiment, the linker positions the deaminase domain in proximity to a target base. In yet another embodiment, the gene-editing protein deaminates the target base. In yet another embodiment, the gene-editing protein comprises a glycosylase-inhibitor domain. In yet another embodiment, the gene-editing protein comprises glycosylase-inhibitor activity. In one embodiment, the glycosylase inhibitor is a uracil glycosylase inhibitor. In another embodiment, the glycosylase inhibitor is a N-methylpurine DNA glycosylase inhibitor. In yet another embodiment, the cell is reprogrammed, and subsequently, the cell is gene-edited. In yet another embodiment, the cell is gene-edited, and subsequently, the cell is reprogrammed. In yet another embodiment, the gene-editing and reprogramming are performed within about 7 days of each other. In yet another embodiment, the gene-editing and reprogramming occur simultaneously or on the same day. In yet another embodiment, the cell is a skin cell, the skin cell is gene-edited to disrupt the CCR5 gene, the skin cell is reprogrammed to a hematopoietic stem cell, thus producing a therapeutic for HIV/AIDS, and the therapeutic is used to treat a patient with HIV/AIDS. In yet another embodiment, the skin cell is derived from the same patient whom the therapeutic is used to treat.

[0552] Certain embodiments are directed to methods and compositions for the treatment of rare diseases. In some embodiments, the rare disease is one or more of a rare metabolic disease, a rare cardiovascular disease, a rare dermatologic disease, a rare neurologic disease, a rare developmental disease, a rare genetic disease, a rare pulmonary disease, a rare liver disease, a rare kidney disease, a rare psychiatric disease, a rare reproductive disease, a rare musculoskeletal disease, a rare orthopedic disease, an inborn error of metabolism, a lysosomal storage disease, and a rare ophthalmologic disease. In one embodiment, the disease is alpha-1-antitrypsin deficiency. Some embodiments are directed to a treatment comprising a nucleic acid encoding a gene-editing protein that is capable of causing a deletion in a gene that is associated with one or more of a gain-of-function mutation, a loss-of-function mutation, a recessive mutation, a dominant mutation or a dominant negative mutation. Other embodiments are directed to a treatment comprising a nucleic acid encoding a gene-editing protein that is capable of correcting one or more of a gain-of-function mutation, a loss-of-function mutation, a recessive mutation, a dominant mutation, or a dominant negative mutation. In one embodiment, the treatment ameliorates one or more of the symptoms in a subject. In another embodiment, the subject is a human subject. In yet another embodiment, the subject is a veterinary subject. Some embodiments are directed to a treatment for alpha-1-antitrypsin deficiency comprising administering to a subject a nucleic acid comprising a gene-editing protein that is capable of causing a deletion in or near the SERPINA1 gene. Other embodiments are directed to a treatment for alpha-1-antitrypsin deficiency comprising administering to a subject a nucleic acid encoding a gene-editing protein that is capable of correcting a mutation in or near the SERPINA1 gene. In one embodiment, the mutation is the Z mutation. In one embodiment, the deletion or correction reduces the accumulation of polymerized alpha-1-antitrypsin protein in the subject's cells and/or increases the secretion of alpha-1-antitrypsin from the subject's cells. In another embodiment, the treated cells regenerate a diseased organ. In yet another embodiment, the diseased organ is the liver. In yet another embodiment, the diseased organ is the lung. In yet another embodiment, the treatment delays or eliminates the subject's need for a liver and/or lung transplant. Other embodiments are directed to a treatment for epidermolysis bullosa. In one embodiment, the epidermolysis bullosa is dystrophic epidermolysis bullosa. In another embodiment, the epidermolysis bullosa is epidermolysis bullosa simplex. In yet another embodiment, the dystrophic epidermolysis bullosa is recessive dystrophic epidermolysis bullosa. In some embodiments, the treatment comprises administering to a subject a nucleic acid encoding a gene-editing protein that is capable of correcting a mutation in or near the COL7A1 gene. In one embodiment, the correction increases the amount of functional collagen VII produced by the subject's cells. In another embodiment, the treatment reduces the size, severity, and/or frequency of recurrence of skin lesions and/or blisters. Still other embodiments are directed to a treatment for primary hyperoxaluria. In one embodiment the primary hyperoxaluria is type I primary hyperoxaluria. In another embodiment, the treatment comprises administering to a subject a nucleic acid encoding a gene-editing protein that is capable of correcting a mutation in or near the AGXT gene. In yet another embodiment, the treatment delays or eliminates the subject's need for a kidney and/or liver transplant.

[0553] Genes that can be edited according to the methods of the present invention to produce therapeutics of the present invention include genes that can be edited to restore normal function, as well as genes that can be edited to reduce or eliminate function. Such genes include, but are not limited to alpha-1-antitrypsin (SERPINA1), mutations in which can cause alpha-1-antitrypsin deficiency, beta globin (HBB), mutations in which can cause sickle cell disease (SCD) and β-thalassemia, breast cancer 1, early onset (BRCA1) and breast cancer 2, early onset (BRCA2), mutations in which can increase susceptibility to breast cancer, C—C chemokine receptor type 5 (CCR5) and C—X—C chemokine receptor type 4 (CXCR4), mutations in which can confer resistance to HIV infection, cystic fibrosis transmembrane conductance regulator (CFTR), mutations in which can cause cystic fibrosis, dystrophin (DMD), mutations in which can cause muscular dystrophy, including Duchenne muscular dystrophy and Becker's muscular dystrophy, glutamate decarboxylase 1 and glutamate decarboxylase 2 (GAD1, GAD2), mutations in which can prevent autoimmune destruction of n-cells, hemoglobin alpha 1, hemoglobin alpha 2, and hemoglobin delta (HBA1, HBA2, and HBD), mutations in which can cause thalassemia, desmoplakin, keratin 5, keratin 14, plectin, integrin alpha-6, integrin beta-4, laminin subunit alpha-3, laminin subunit beta-3, laminin subunit gamma-2, collagen type VII alpha 1, collagen type XVII alpha 1, and matrix metalloproteinase-1 (DSP, KRT5, KRT14, PLEC1, ITGA6, ITGB4, LAMA3, LAMB3, LAMC2, COL7A1, COL17A1, and MMP1), mutations in which can cause epidermolysis bullosa, Huntington (HTT), mutations in which can cause Huntington's disease, superoxide dismutase 1 (SOD1), mutations in which can cause amyotrophic lateral sclerosis (ALS), XPA, XPB, XPC, XPD (ERCC6) and polymerase (DNA directed), eta (POLH), mutations in which can cause xeroderma pigmentosum, leucine-rich repeat kinase 2 (LRRK2), mutations in which can cause Parkinson's disease, and Fanconi anemia, complementation groups A, B, C, D1, D2, E, F, G, I, J, L, M, N, P (FANCA, FANCB, FANCC, FANCD1, FANCD2, FANCE, FANCF, FANCG, FANCI, FANCJ, FANCL, FANCM, FANCN, FANCP), and RAD51 homolog C (S. cerevisiae) (RAD51C), mutations in which can cause Fanconi anemia.

[0554] Certain embodiments are directed to a therapeutic comprising a nucleic acid. In one embodiment, the nucleic acid encodes one or more gene-editing proteins. Other embodiments are directed to a therapeutic comprising one or more cells that are transfected, reprogrammed, and/or gene-edited in vivo according to the methods of the present invention. In one embodiment, a cell is transfected, reprogrammed, and/or gene-edited, and the transfected, reprogrammed, and/or gene-edited cell is introduced into a patient. In another embodiment, the cell is harvested from the same patient into whom the transfected, reprogrammed and/or gene-edited cell is introduced. Examples of diseases that can be treated with therapeutics of the present invention include, but are not limited to Alzheimer's disease, spinal cord injury, amyotrophic lateral sclerosis, cystic fibrosis, heart disease, including ischemic and dilated cardiomyopathy, macular degeneration, Parkinson's disease, Huntington's disease, diabetes, sickle-cell anemia, thalassemia, Fanconi anemia, xeroderma pigmentosum, muscular dystrophy, severe combined immunodeficiency, hereditary sensory neuropathy, cancer, and HIV/AIDS. In certain embodiments, the therapeutic comprises a cosmetic. In one embodiment, a cell is harvested from a patient, the cell is reprogrammed and expanded to a large number of adipose cells to produce a cosmetic, and the cosmetic is introduced into the patient. In still another embodiment, the cosmetic is used for tissue reconstruction.

[0555] While detailed examples are provided herein for the production of specific types of cells and for the production of therapeutics comprising specific types of cells, it is recognized that the methods of the present invention can be used to produce many other types of cells, and to produce therapeutics comprising one or more of many other types of cells, for example, by reprogramming a cell according to the methods of the present invention, and culturing the cell under conditions that mimic one or more aspects of development by providing conditions that resemble the conditions present in the cellular microenvironment during development.

[0556] Certain embodiments are directed to a library of cells with a variety of human leukocyte antigen (HLA) types (“HLA-matched libraries”). An HLA-matched library may be beneficial in part because it can provide for the rapid production and/or distribution of therapeutics without the patient having to wait for a therapeutic to be produced from the patient's cells. Such a library may be particularly beneficial for the production of cosmetics and for the treatment of heart disease and diseases of the blood and/or immune system for which patients may benefit from the immediate availability of a therapeutic or cosmetic.

[0557] The DNA sequence of a cell can be altered by contacting the cell with a gene-editing protein or by inducing the cell to express a gene-editing protein. However, previously disclosed gene-editing proteins suffer from low binding efficiency and excessive off-target activity, which can introduce undesired mutations in the DNA of the cell, severely limiting their use in vivo, for example in therapeutic and cosmetic applications, in which the introduction of undesired mutations in a patient's cells could lead to the development of cancer. It has now been discovered that gene-editing proteins that comprise the Stsl endonuclease cleavage domain (SEQ ID NO: 1) can exhibit substantially lower off-target activity in vivo than previously disclosed gene-editing proteins, while maintaining a high level of on-target activity in vivo. Other novel engineered proteins have also been discovered that can exhibit high on-target activity in vivo, low off-target activity in vivo, small size, solubility, and other desirable characteristics when they are used as the nuclease domain of a gene-editing protein: Stsl-HA (SEQ ID NO: 2), Stsl-HA2 (SEQ ID NO: 3), Stsl-UHA (SEQ ID NO: 4), Stsl-UHA2 (SEQ ID NO: 5), Stsl-HF (SEQ ID NO: 6), and Stsl-UHF (SEQ ID NO: 7). Stsl-HA, Stsl-HA2 (high activity), Stsl-UHA, and Stsl-UHA2 (ultra-high activity) can exhibit higher on-target activity in vivo than both wild-type Stsl and wild-type FokI, due in part to specific amino-acid substitutions within the N-terminal region at the 34 and 61 positions, while Stsl-HF (high fidelity) and Stsl-UHF (ultra-high fidelity) can exhibit lower off-target activity in vivo than both wild-type Stsl and wild-type FokI, due in part to specific amino-acid substitutions within the C-terminal region at the 141 and 152 positions.

[0558] Certain embodiments are therefore directed to a protein. In some embodiments, the protein is present in vivo. In other embodiments, the protein comprises a nuclease domain. In one embodiment, the nuclease domain comprises one or more of the cleavage domain of FokI endonuclease (SEQ ID NO: 53), the cleavage domain of Stsl endonuclease (SEQ ID NO: 1), Stsl-HA (SEQ ID NO: 2), Stsl-HA2 (SEQ ID NO: 3), Stsl-UHA (SEQ ID NO: 4), Stsl-UHA2 (SEQ ID NO: 5), Stsl-HF (SEQ ID NO: 6), and Stsl-UHF (SEQ ID NO: 7) or a biologically active fragment or variant thereof.

[0559] It has also been discovered that engineered gene-editing proteins that comprise DNA-binding domains comprising certain novel repeat sequences can exhibit lower off-target activity in vivo than previously disclosed gene-editing proteins, while maintaining a high level of on-target activity in vivo. Certain of these engineered gene-editing proteins can provide several advantages over previously disclosed gene-editing proteins, including, for example, increased flexibility of the linker region connecting repeat sequences, which can result in increased binding efficiency. Certain embodiments are therefore directed to a protein comprising a plurality of repeat sequences. In one embodiment, at least one of the repeat sequences contains the amino-acid sequence: GabG, where “a” and “b” each represent any amino acid. In one embodiment, the protein is a gene-editing protein. In another embodiment, one or more of the repeat sequences are present in a DNA-binding domain. In a further embodiment, “a” and “b” are each independently selected from the group: H and G. In a still further embodiment, “a” and “b” are H and G, respectively. In one embodiment, the amino-acid sequence is present within about 5 amino acids of the C-terminus of the repeat sequence. In another embodiment, the amino-acid sequence is present at the C-terminus of the repeat sequence. In some embodiments, one or more G in the amino-acid sequence GabG is replaced with one or more amino acids other than G, for example A, H or GG. In one embodiment, the repeat sequence has a length of between about 32 and about 40 amino acids or between about 33 and about 39 amino acids or between about 34 and 38 amino acids or between about 35 and about 37 amino acids or about 36 amino acids or greater than about 32 amino acids or greater than about 33 amino acids or greater than about 34 amino acids or greater than about 35 amino acids. Other embodiments are directed to a protein comprising one or more transcription activator-like effector domains. In one embodiment, at least one of the transcription activator-like effector domains comprises a repeat sequence. Other embodiments are directed to a protein comprising a plurality of repeat sequences generated by inserting one or more amino acids between at least two of the repeat sequences of a transcription activator-like effector domain. In one embodiment, one or more amino acids is inserted about 1 or about 2 or about 3 or about 4 or about 5 amino acids from the C-terminus of at least one repeat sequence. Still other embodiments are directed to a protein comprising a plurality of repeat sequences, wherein about every other repeat sequence has a different length than the repeat sequence immediately preceding or following the repeat sequence. In one embodiment, every other repeat sequence is about 36 amino acids long. In another embodiment, every other repeat sequence is 36 amino acids long. Still other embodiments are directed to a protein comprising a plurality of repeat sequences, wherein the plurality of repeat sequences comprises at least two repeat sequences that are each at least 36 amino acids long, and wherein at least two of the repeat sequences that are at least 36 amino acids long are separated by at least one repeat sequence that is less than 36 amino acids long. Some embodiments are directed to a protein that comprises one or more sequences selected from, for example, SEQ ID NO: 54, SEQ ID NO: 55, SEQ ID NO: 56, SEQ ID NO: 57, SEQ ID NO: 58, SEQ ID NO: 59, and SEQ ID NO: 60.

[0560] Other embodiments are directed to a protein that comprises a DNA-binding domain. In some embodiments, the DNA-binding domain comprises a plurality of repeat sequences. In one embodiment, the plurality of repeat sequences enables high-specificity recognition of a binding site in a target DNA molecule. In another embodiment, at least two of the repeat sequences have at least about 50%, or about 60%, or about 70%, or about 80%, or about 90%, or about 95%, or about 98%, or about 99% homology to each other. In a further embodiment, at least one of the repeat sequences comprises one or more regions capable of binding to a binding site in a target DNA molecule. In a still further embodiment, the binding site comprises a defined sequence of between about 1 to about 5 bases in length. In one embodiment, the DNA-binding domain comprises a zinc finger. In another embodiment, the DNA-binding domain comprises a transcription activator-like effector (TALE). In a further embodiment, the plurality of repeat sequences includes at least one repeat sequence having at least about 50% or about 60% or about 70% or about 80% or about 90% or about 95% or about 98%, or about 99% homology to a TALE. In a still further embodiment, the gene-editing protein comprises a clustered regularly interspaced short palindromic repeat (CRISPR)-associated protein. In one embodiment, the gene-editing protein comprises a nuclear-localization sequence. In another embodiment, the nuclear-localization sequence comprises the amino-acid sequence: PKKKRKV (SEQ ID NO: 471). In one embodiment, the gene-editing protein comprises a mitochondrial-localization sequence. In another embodiment, the mitochondrial-localization sequence comprises the amino-acid sequence: LGRVIPRKIASRASLM (SEQ ID NO: 472). In one embodiment, the gene-editing protein comprises a linker. In another embodiment, the linker connects a DNA-binding domain to a nuclease domain. In a further embodiment, the linker is between about 1 and about 10 amino acids long. In some embodiments, the linker is about 1, about 2, or about 3, or about 4, or about 5, or about 6, or about 7, or about 8, or about 9, or about 10 amino acids long. In one embodiment, the gene-editing protein is capable of generating a nick or a double-strand break in a target DNA molecule.

[0561] Certain embodiments are directed to a method for modifying the genome of a cell in vivo, the method comprising introducing into a cell in vivo a nucleic acid molecule encoding a non-naturally occurring fusion protein comprising an artificial transcription activator-like (TAL) effector repeat domain comprising one or more repeat units 36 amino acids in length and an endonuclease domain, wherein the repeat domain is engineered for recognition of a predetermined nucleotide sequence, and wherein the fusion protein recognizes the predetermined nucleotide sequence. In one embodiment, the cell is a eukaryotic cell. In another embodiment, the cell is an animal cell. In a further embodiment, the cell is a mammalian cell. In a still further embodiment, the cell is a human cell. In one embodiment, the cell is a plant cell. In another embodiment, the cell is a prokaryotic cell. In some embodiments, the fusion protein introduces an endonucleolytic cleavage in a nucleic acid of the cell, whereby the genome of the cell is modified.

[0562] Certain embodiments are directed to a composition for altering the DNA sequence of a cell in vivo comprising a nucleic acid, wherein the nucleic acid encodes a gene-editing protein. Other embodiments are directed to a composition for altering the DNA sequence of a cell in vivo comprising a nucleic-acid mixture, wherein the nucleic-acid mixture comprises: a first nucleic acid that encodes a first gene-editing protein, and a second nucleic acid that encodes a second gene-editing protein. In one embodiment, the binding site of the first gene-editing protein and the binding site of the second gene-editing protein are present in the same target DNA molecule. In another embodiment, the binding site of the first gene-editing protein and the binding site of the second gene-editing protein are separated by less than about 50 bases, or less than about 40 bases, or less than about 30 bases or less than about 20 bases, or less than about 10 bases, or between about 10 bases and about 25 bases or about 15 bases. In one embodiment, the nuclease domain of the first gene-editing protein and the nuclease domain of the second gene-editing protein are capable of forming a dimer. In another embodiment, the dimer is capable of generating a nick or double-strand break in a target DNA molecule.

[0563] Certain embodiments are directed to a therapeutic composition. Other embodiments are directed to a cosmetic composition. In some embodiments, the composition comprises a repair template. In a further embodiment, the repair template is a single-stranded DNA molecule or a double-stranded DNA molecule.

[0564] Other embodiments are directed to an article of manufacture for synthesizing a protein or a nucleic acid encoding a protein. In one embodiment, the article is a nucleic acid. In another embodiment, the protein comprises a DNA-binding domain. In a further embodiment, the nucleic acid comprises a nucleotide sequence encoding a DNA-binding domain. In one embodiment, the protein comprises a nuclease domain. In another embodiment, the nucleic acid comprises a nucleotide sequence encoding a nuclease domain. In one embodiment, the protein comprises a plurality of repeat sequences. In another embodiment, the nucleic acid encodes a plurality of repeat sequences. In a further embodiment, the nuclease domain is selected from FokI, Stsl, Stsl-HA, Stsl-HA2, Stsl-UHA, Stsl-UHA2, Stsl-HF, and Stsl-UHF or a natural or engineered variant or biologically active fragment thereof. In one embodiment, the nucleic acid comprises an RNA-polymerase promoter. In another embodiment, the RNA-polymerase promoter is a T7 promoter or a SP6 promoter. In a further embodiment, the nucleic acid comprises a viral promoter. In one embodiment, the nucleic acid comprises an untranslated region. In another embodiment, the nucleic acid is an in vitro-transcription template.

[0565] Certain embodiments are directed to a method for inducing a cell to express a protein in vivo. Other embodiments are directed to a method for altering the DNA sequence of a cell in vivo comprising transfecting the cell in vivo with a gene-editing protein or inducing the cell to express a gene-editing protein in vivo. Still other embodiments are directed to a method for reducing the expression of a protein of interest in a cell in vivo. In one embodiment, the cell is induced to express a gene-editing protein, wherein the gene-editing protein is capable of creating a nick or a double-strand break in a target DNA molecule. In another embodiment, the nick or double-strand break results in inactivation of a gene. Still other embodiments are directed to a method for generating an inactive, reduced-activity or dominant-negative form of a protein in vivo. In one embodiment, the protein is survivin. Still other embodiments are directed to a method for repairing one or more mutations in a cell in vivo. In one embodiment, the cell is contacted with a repair template. In another embodiment, the repair template is a DNA molecule. In a further embodiment, the repair template does not contain a binding site of the gene-editing protein. In a still further embodiment, the repair template encodes an amino-acid sequence that is encoded by a DNA sequence that comprises a binding site of the gene-editing protein.

[0566] In various embodiments, the repair template is about 20 nucleotides, or about 30 nucleotides, or about 40 nucleotides, or about 50 nucleotides, or about 60 nucleotides, or about 70 nucleotides, or about 80 nucleotides, or about 90 nucleotides, or about 100 nucleotides, or about 150 nucleotides, or about 200 nucleotides, or about 300 nucleotides, or about 400 nucleotides, or about 500 nucleotides, or about 750 nucleotides, or about 1000 nucleotides. In various embodiments, the repair template is about 20-1000 nucleotides, or about 20-500 nucleotides, or about 20-400 nucleotides, or about 20-200 nucleotides, or about 20-100 nucleotides, or about 80-100 nucleotides, or about 50-100 nucleotides.

[0567] In various embodiments, the mass ratio of RNA (e.g. synthetic RNA encoding gene-editing protein) to repair template is about 1:10, or about 1:9, or about 1:8, or about 1:7, or about 1:6, or about 1:5, or about 1:4, or about 1:3, or about 1:2, or about 1:1, or about 2:1, or about 3:1, or about 4:1, or about 5:1, or about 6:1, or about 7:1, or about 8:1, or about 9:1, or about 10:1.

[0568] In various embodiments, the molar ratio of RNA (e.g. synthetic RNA encoding gene-editing protein) to repair template is about 1:10, or about 1:9, or about 1:8, or about 1:7, or about 1:6, or about 1:5, or about 1:4, or about 1:3, or about 1:2, or about 1:1, or about 2:1, or about 3:1, or about 4:1, or about 5:1, or about 6:1, or about 7:1, or about 8:1, or about 9:1, or about 10:1.

[0569] In various embodiments, the repair template has a dual function, causing a repair to a gene-edited target sequence and preventing further binding of a gene-editing protein, thereby reducing or eliminating further gene-editing (e.g. via the repair template causing a repair that renders what was the gene-editing protein binding site no longer suitable for gene-editing protein binding). Accordingly, in some embodiments, the present gene-editing methods are tunable to ensure a single gene-edit per target site.

[0570] Other embodiments are directed to a method for treating a patient comprising administering to the patient a therapeutically effective amount of a protein or a nucleic acid encoding a protein. In one embodiment, the treatment results in one or more of the patient's symptoms being ameliorated. Certain embodiments are directed to a method for treating a patient comprising: a. inducing a cell to express a protein of interest by transfecting the cell in vivo with a nucleic acid encoding the protein of interest and/or b. reprogramming the cell in vivo. In one embodiment, the cell is reprogrammed to a less differentiated state. In another embodiment, the cell is reprogrammed by transfecting the cell with one or more synthetic RNA molecules encoding one or more reprogramming proteins. In a further embodiment, the cell is differentiated. In a still further embodiment, the cell is differentiated into one of a skin cell, a glucose-responsive insulin-producing cell, a hematopoietic cell, a cardiac cell, a retinal cell, a renal cell, a neural cell, a stromal cell, a fat cell, a bone cell, a muscle cell, an oocyte, and a sperm cell. Other embodiments are directed to a method for treating a patient comprising: a. inducing a cell to express a gene-editing protein by transfecting the cell in vivo with a nucleic acid encoding a gene-editing protein and/or b. reprogramming the cell in vivo.

[0571] Other embodiments are directed to a complexation medium. In one embodiment, the complexation medium has a pH greater than about 7, or greater than about 7.2, or greater than about 7.4, or greater than about 7.6, or greater than about 7.8, or greater than about 8.0, or greater than about 8.2, or greater than about 8.4, or greater than about 8.6, or greater than about 8.8, or greater than about 9.0. In another embodiment, the complexation medium comprises transferrin. In a further embodiment, the complexation medium comprises DMEM. In a still further embodiment, the complexation medium comprises DMEM/F12. Still other embodiments are directed to a method for forming nucleic-acid-transfection-reagent complexes. In one embodiment, the transfection reagent is incubated with a complexation medium. In another embodiment, the incubation occurs before a mixing step. In a further embodiment, the incubation step is between about 5 seconds and about 5 minutes or between about 10 seconds and about 2 minutes or between about 15 seconds and about 1 minute or between about 30 seconds and about 45 seconds. In one embodiment, the transfection reagent is selected from Table 1. In another embodiment, the transfection reagent is a lipid or lipidoid. In a further embodiment, the transfection reagent comprises a cation. In a still further embodiment, the cation is a multivalent cation. In a still further embodiment, the transfection reagent is N1-[2-((1S)-1-[(3-aminopropyl)amino]-4-[di(3-amino-propyl)amino]butylcarboxamido)ethyl]-3,4-di[oleyloxy]-benzamide (a.k.a. MVL5) or a derivative thereof.

[0572] Certain embodiments are directed to a method for inducing a cell to express a protein by contacting the cell with a nucleic acid in vivo. In one embodiment, the cell is a mammalian cell. In another embodiment, the cell is a human cell or a rodent cell. Other embodiments are directed to a cell produced using one or more of the methods of the present invention. In one embodiment, the cell is present in a patient. In another embodiment, the cell is isolated from a patient. Other embodiments are directed to a screening library comprising a cell produced using one or more of the methods of the present invention. In one embodiment, the screening library is used for at least one of toxicity screening, including: cardiotoxicity screening, neurotoxicity screening, and hepatotoxicity screening, efficacy screening, high-throughput screening, high-content screening, and other screening.

[0573] Other embodiments are directed to a kit containing a nucleic acid. In one embodiment, the kit contains a delivery reagent (a.k.a. “transfection reagent”). In another embodiment, the kit is a reprogramming kit. In a further embodiment, the kit is a gene-editing kit. Other embodiments are directed to a kit for producing nucleic acids. In one embodiment, the kit contains at least two of pseudouridine-triphosphate, 5-methyluridine triphosphate, 5-methylcytidine triphosphate, 5-hydroxymethylcytidine triphosphate, N4-methylcytidine triphosphate, N4-acetylcytidine triphosphate, and 7-deazaguanosine triphosphate or one or more derivatives thereof. Other embodiments are directed to a therapeutic or cosmetic comprising a nucleic acid. In one embodiment, the therapeutic or cosmetic is a pharmaceutical composition. In another embodiment, the pharmaceutical composition is formulated. In a further embodiment, the formulation comprises an aqueous suspension of liposomes. Example liposome components are set forth in Table 1, and are given by way of example, and not by way of limitation. In one embodiment, the liposomes include one or more polyethylene glycol (PEG) chains. In another embodiment, the PEG is PEG2000. In a further embodiment, the liposomes include 1,2-distearoyl-sn-glycero-3-phosphoethanolamine (DSPE) or a derivative thereof. In one embodiment, the therapeutic comprises one or more ligands. In another embodiment, the therapeutic comprises at least one of androgen, CD30 (TNFRSF8), a cell-penetrating peptide, CXCR, estrogen, epidermal growth factor, EGFR, HER2, folate, insulin, insulin-like growth factor-I, interleukin-13, integrin, progesterone, stromal-derived-factor-1, thrombin, vitamin D, and transferrin or a biologically active fragment or variant thereof. Still other embodiments are directed to a therapeutic or cosmetic comprising a cell generated using one or more of the methods of the present invention. In one embodiment, the therapeutic is administered to a patient for the treatment of any of the diseases or disorders described herein, including by way of non-limitation, type 1 diabetes, heart disease, including ischemic and dilated cardiomyopathy, macular degeneration, Parkinson's disease, cystic fibrosis, sickle-cell anemia, thalassemia, Fanconi anemia, severe combined immunodeficiency, hereditary sensory neuropathy, xeroderma pigmentosum, Huntington's disease, muscular dystrophy, amyotrophic lateral sclerosis, Alzheimer's disease, cancer, and infectious diseases including: hepatitis and HIV/AIDS.

[0574] Other embodiments are directed to a method for reprogramming a cell in vivo. In one embodiment, the cell is reprogrammed by contacting the cell with one or more nucleic acids. In one embodiment, the cell is contacted with a plurality of nucleic acids encoding at least one of Oct4 protein, Sox2 protein, Klf4 protein, c-Myc protein, Lin28 protein or a biologically active fragment, variant or derivative thereof. In another embodiment, the cell is contacted with a plurality of nucleic acids encoding a plurality of proteins including: Oct4 protein, Sox2 protein, Klf4 protein, and c-Myc protein or one or more biologically active fragments, variants or derivatives thereof. Still other embodiments are directed to a method for gene editing a cell in vivo. In one embodiment, the cell is gene-edited by contacting the cell with one or more nucleic acids.

[0575] Certain embodiments are directed to a method for inducing a cell in vivo to express a protein of interest comprising contacting a cell in vivo with a solution comprising albumin that is treated with an ion-exchange resin or charcoal and one or more nucleic acid molecules, wherein at least one of the one or more nucleic acid molecules encodes a protein of interest. In one embodiment, the method results in the cell expressing the protein of interest. In another embodiment, the one or more nucleic acid molecules comprise a synthetic RNA molecule. In one embodiment, the cell is a skin cell. In another embodiment, the cell is a muscle cell. In yet another embodiment, the cell is a dermal fibroblast. In yet another embodiment, the cell is a myoblast. In one embodiment, the protein of interest is an extracellular matrix protein. In another embodiment, the protein of interest is selected from elastin, collagen, laminin, fibronectin, vitronectin, lysyl oxidase, elastin binding protein, a growth factor, fibroblast growth factor, transforming growth factor beta, granulocyte colony-stimulating factor, a matrix metalloproteinase, an actin, fibrillin, microfibril-associated glycoprotein, a lysyl-oxidase-like protein, and platelet-derived growth factor. In one embodiment, the solution is delivered to the dermis. In another embodiment, the delivering is by injection. In yet another embodiment, the delivering is by injection using a microneedle array. In one embodiment, the solution further comprises a growth factor. In another embodiment, the growth factor is selected from fibroblast growth factor and transforming growth factor beta. In yet another embodiment, the solution further comprises cholesterol. Other embodiments are directed a method for inducing a cell in vivo to express a protein of interest comprising contacting a cell in vivo with a solution comprising cholesterol and one or more nucleic acid molecules, wherein at least one of the one or more nucleic acid molecules encodes a protein of interest. In one embodiment, the method results in the cell expressing the protein of interest. Still other embodiments are directed to a method for transfecting a cell in vivo with a nucleic acid molecule comprising contacting a cell in vivo with a solution comprising albumin that is treated with an ion-exchange resin or charcoal and a nucleic acid molecule. In one embodiment, the method results in the cell being transfected with the nucleic acid molecule. In another embodiment, the nucleic acid molecule is one of a dsDNA molecule, a ssDNA molecule, a dsRNA molecule, a ssRNA molecule, a plasmid, an oligonucleotide, a synthetic RNA molecule, a mi RNA molecule, an mRNA molecule, an siRNA molecule. Still other embodiments are directed to a method for treating a patient comprising delivering to a patient a composition comprising albumin that is treated with an ion-exchange resin or charcoal and one or more nucleic acid molecules, wherein at least one of the one or more nucleic acid molecules encodes a protein of interest. In one embodiment, the method results in the expression of the protein of interest in the patient. In another embodiment, the method results in the expression of the protein of interest in the dermis of the patient.

[0576] Despite the tendency of transfection reagent nucleic acid complexes to precipitate, form clumps or otherwise degrade when stored for more than a few minutes, the present inventors have surprisingly discovered that transfection reagent nucleic acid complexes produced according to some embodiments of the present invention can be frozen and/or can be stored at various temperatures, including room temperature, about 4° C., about −20° C., about −80° C., and about −196° C. for an extended period of time, for example, for several hours, about 1 day, about 1 week, about 1 month, about 1 year, and longer than about 1 year. Some embodiments are therefore directed to a pharmaceutical formulation comprising synthetic RNA and a transfection reagent, wherein the pharmaceutical formulation is provided in solid form. Other embodiments are directed to a pharmaceutical formulation comprising synthetic RNA transfection reagent complexes, wherein the synthetic RNA transfection reagent complexes are provided in solid form. In various embodiments, the synthetic RNA transfection reagent complexes are provided in frozen form. Various embodiments are directed to a method for stabilizing nucleic acid transfection reagent complexes comprising forming nucleic acid transfection reagent complexes and contacting the nucleic acid transfection reagent complexes or vessel in which such are contained with a cryogenic liquid to produce stabilized nucleic acid transfection reagent complexes. In one embodiment, the nucleic acid transfection reagent complexes are stabilized for shipment or storage.

[0577] Illustrative subjects or patients refers to any vertebrate including, without limitation, humans and other primates (e.g., chimpanzees and other apes and monkey species), farm animals (e.g., cattle, sheep, pigs, goats, and horses), domestic mammals (e.g., dogs and cats), laboratory animals (e.g., rodents such as mice, rats, and guinea pigs), and birds (e.g., domestic, wild and game birds such as chickens, turkeys and other gallinaceous birds, ducks, geese, and the like). In some embodiments, the subject is a mammal. In some embodiments, the subject is a human.

### Definitions

[0578] By “molecule” is meant a molecular entity (molecule, ion, complex, etc.).

[0579] By “RNA molecule” is meant a molecule that comprises RNA.

[0580] By “synthetic RNA molecule” is meant an RNA molecule that is produced outside of a cell or that is produced inside of a cell using bioengineering, by way of non-limiting example, an RNA molecule that is produced in an in vitro-transcription reaction, an RNA molecule that is produced by direct chemical synthesis or an RNA molecule that is produced in a genetically-engineered E. coli cell.

[0581] By “transfection” is meant contacting a cell with a molecule, wherein the molecule is internalized by the cell.

[0582] By “upon transfection” is meant during or after transfection.

[0583] By “transfection reagent” is meant a substance or mixture of substances that associates with a molecule and facilitates the delivery of the molecule to and/or internalization of the molecule by a cell, by way of non-limiting example, a cationic lipid, a charged polymer or a cell-penetrating peptide.

[0584] By “reagent-based transfection” is meant transfection using a transfection reagent.

[0585] By “medium” is meant a solvent or a solution comprising a solvent and a solute, by way of non-limiting example, Dulbecco's Modified Eagle's Medium (DMEM), DMEM+10% fetal bovine serum (FBS), saline or water.

[0586] By “complexation medium” is meant a medium to which a transfection reagent and a molecule to be transfected are added and in which the transfection reagent associates with the molecule to be transfected.

[0587] By “transfection medium” is meant a medium that can be used for transfection, by way of non-limiting example, Dulbecco's Modified Eagle's Medium (DMEM), DMEM/F12, saline or water.

[0588] By “recombinant protein” is meant a protein or peptide that is not produced in animals or humans. Non-limiting examples include human transferrin that is produced in bacteria, human fibronectin that is produced in an in vitro culture of mouse cells, and human serum albumin that is produced in a rice plant.

[0589] By “Oct4 protein” is meant a protein that is encoded by the POU5F1 gene, or a natural or engineered variant, family-member, orthologue, fragment or fusion construct thereof, by way of non-limiting example, human Oct4 protein (SEQ ID NO: 8), mouse Oct4 protein, Oct1 protein, a protein encoded by POU5F1 pseudogene 2, a DNA-binding domain of Oct4 protein or an Oct4-GFP fusion protein. In some embodiments the Oct4 protein comprises an amino acid sequence that has at least 70% identity with SEQ ID NO: 8, or in other embodiments, at least 75%, 80%, 85%, 90%, or 95% identity with SEQ ID NO: 8. In some embodiments, the Oct4 protein comprises an amino acid sequence having from 1 to 20 amino acid insertions, deletions, or substitutions (collectively) with respect to SEQ ID NO: 8. Or in other embodiments, the Oct4 protein comprises an amino acid sequence having from 1 to 15 or from 1 to 10 amino acid insertions, deletions, or substitutions (collectively) with respect to SEQ ID NO: 8.

[0590] By “Sox2 protein” is meant a protein that is encoded by the SOX2 gene, or a natural or engineered variant, family-member, orthologue, fragment or fusion construct thereof, by way of non-limiting example, human Sox2 protein (SEQ ID NO: 9), mouse Sox2 protein, a DNA-binding domain of Sox2 protein or a Sox2-GFP fusion protein. In some embodiments the Sox2 protein comprises an amino acid sequence that has at least 70% identity with SEQ ID NO: 9, or in other embodiments, at least 75%, 80%, 85%, 90%, or 95% identity with SEQ ID NO: 9. In some embodiments, the Sox2 protein comprises an amino acid sequence having from 1 to 20 amino acid insertions, deletions, or substitutions (collectively) with respect to SEQ ID NO: 9. Or in other embodiments, the Sox2 protein comprises an amino acid sequence having from 1 to 15 or from 1 to 10 amino acid insertions, deletions, or substitutions (collectively) with respect to SEQ ID NO: 9.

[0591] By “Klf4 protein” is meant a protein that is encoded by the KLF4 gene, or a natural or engineered variant, family-member, orthologue, fragment or fusion construct thereof, by way of non-limiting example, human Klf4 protein (SEQ ID NO: 10), mouse Klf4 protein, a DNA-binding domain of Klf4 protein or a Klf4-GFP fusion protein. In some embodiments the Klf4 protein comprises an amino acid sequence that has at least 70% identity with SEQ ID NO: 10, or in other embodiments, at least 75%, 80%, 85%, 90%, or 95% identity with SEQ ID NO: 10. In some embodiments, the Klf4 protein comprises an amino acid sequence having from 1 to 20 amino acid insertions, deletions, or substitutions (collectively) with respect to SEQ ID NO: 10. Or in other embodiments, the Klf4 protein comprises an amino acid sequence having from 1 to 15 or from 1 to 10 amino acid insertions, deletions, or substitutions (collectively) with respect to SEQ ID NO: 10.

[0592] By “c-Myc protein” is meant a protein that is encoded by the MYC gene, or a natural or engineered variant, family-member, orthologue, fragment or fusion construct thereof, by way of non-limiting example, human c-Myc protein (SEQ ID NO: 11), mouse c-Myc protein, I-Myc protein, c-Myc (T58A) protein, a DNA-binding domain of c-Myc protein or a c-Myc-GFP fusion protein. In some embodiments the c-Myc protein comprises an amino acid sequence that has at least 70% identity with SEQ ID NO: 11, or in other embodiments, at least 75%, 80%, 85%, 90%, or 95% identity with SEQ ID NO: 11. In some embodiments, the c-Myc protein comprises an amino acid having from 1 to 20 amino acid insertions, deletions, or substitutions (collectively) with respect to SEQ ID NO: 11. Or in other embodiments, the c-Myc protein comprises an amino acid sequence having from 1 to 15 or from 1 to 10 amino acid insertions, deletions, or substitutions (collectively) with respect to SEQ ID NO: 11.

[0593] By “erythropoietin” or “erythropoietin protein” is meant a protein that is encoded by the EPO gene, or a natural or engineered variant, family-member, orthologue, fragment or fusion construct thereof, by way of non-limiting example, human erythropoietin (SEQ ID NO: 164), mouse erythropoietin, darbepoetin, darbepoetin alfa, NOVEPOETIN, a binding domain of erythropoietin or an erythropoietin-GFP fusion protein. In some embodiments, the erythropoietin comprises an amino acid sequence that has at least 70% identity with SEQ ID NO: 164, or in other embodiments, at least 75%, 80%, 85%, 90%, or 95% identity with SEQ ID NO: 164. In some embodiments, the erythropoietin comprises an amino acid sequence having from 1 to 20 amino acid insertions, deletions, or substitutions (collectively) with respect to SEQ ID NO: 164. Or in other embodiments, the erythropoietin comprises an amino acid sequence having from 1 to 15 or from 1 to 10 amino acid insertions, deletions, or substitutions (collectively) with respect to SEQ ID NO: 164.

[0594] By “reprogramming” is meant causing a change in the phenotype of a cell, by way of non-limiting example, causing a β-cell progenitor to differentiate into a mature β-cell, causing a fibroblast to dedifferentiate into a pluripotent stem cell, causing a keratinocyte to transdifferentiate into a cardiac stem cell, causing the telomeres of a cell to lengthen or causing the axon of a neuron to grow.

[0595] By “reprogramming factor” is meant a molecule that, when a cell is contacted with the molecule and/or the cell expresses the molecule, can, either alone or in combination with other molecules, cause reprogramming, by way of non-limiting example, Oct4 protein, Tert protein, or erythropoietin.

[0596] By “germ cell” is meant a sperm cell or an egg cell.

[0597] By “pluripotent stem cell” is meant a cell that can differentiate into cells of all three germ layers (endoderm, mesoderm, and ectoderm) in vivo.

[0598] By “somatic cell” is meant a cell that is not a pluripotent stem cell or a germ cell, by way of non-limiting example, a skin cell.

[0599] By “hematopoietic cell” is meant a blood cell or a cell that can differentiate into a blood cell, by way of non-limiting example, a hematopoietic stem cell, or a white blood cell.

[0600] By “cardiac cell” is meant a heart cell or a cell that can differentiate into a heart cell, by way of non-limiting example, a cardiac stem cell, or a cardiomyocyte.

[0601] By “retinal cell” is meant a cell of the retina or a cell that can differentiate into a cell of the retina, by way of non-limiting example, a retinal pigmented epithelial cell.

[0602] By “skin cell” is meant a cell that is normally found in the skin, by way of non-limiting example, a fibroblast, a keratinocyte, a melanocyte, an adipocyte, a mesenchymal stem cell, an adipose stem cell or a blood cell.

[0603] By “immunosuppressant” is meant a substance that can suppress one or more aspects of an immune system, and that is not normally present in a mammal, by way of non-limiting example, B18R or dexamethasone.

[0604] By “single-strand break” is meant a region of single-stranded or double-stranded DNA in which one or more of the covalent bonds linking the nucleotides has been broken in one of the one or two strands.

[0605] By “double-strand break” is meant a region of double-stranded DNA in which one or more of the covalent bonds linking the nucleotides has been broken in each of the two strands.

[0606] By “nucleotide” is meant a nucleotide or a fragment or derivative thereof, by way of non-limiting example, a nucleobase, a nucleoside, a nucleotide-triphosphate, etc.

[0607] By “nucleoside” is meant a nucleotide or a fragment or derivative thereof, by way of non-limiting example, a nucleobase, a nucleoside, a nucleotide-triphosphate, etc.

[0608] By “gene editing” is meant altering the DNA sequence of a cell, by way of non-limiting example, by transfecting the cell with a protein that causes a mutation in the DNA of the cell or by transfecting the cell with a protein that causes a chemical change in the DNA of the cell.

[0609] By “gene-editing protein” is meant a protein that can, either alone or in combination with one or more other molecules, alter the DNA sequence of a cell, by way of non-limiting example, a nuclease, a transcription activator-like effector nuclease (TALEN), a zinc-finger nuclease, a meganuclease, a nickase, a clustered regularly interspaced short palindromic repeat (CRISPR)-associated protein, a DNA-repair protein, a DNA-modification protein, a base-modification protein, a DNA methyltransferase, an protein that causes DNA demethylation, an enzyme for which DNA is a substrate or a natural or engineered variant, family-member, orthologue, domain, fragment or fusion construct thereof.

[0610] By “repair template” is meant a nucleic acid containing a region of at least about 70% homology with a sequence that is within 10 kb of a target site of a gene-editing protein.

[0611] By “repeat sequence” is meant an amino-acid sequence that is present in more than one copy in a protein, to within at least about 10% homology, by way of non-limiting example, a monomer repeat of a transcription activator-like effector.

[0612] By “DNA-binding domain” is meant a region of a molecule that is capable of binding to a DNA molecule, by way of non-limiting example, a protein domain comprising one or more zinc fingers, a protein domain comprising one or more transcription activator-like (TAL) effector repeat sequences or a binding pocket of a small molecule that is capable of binding to a DNA molecule.

[0613] By “binding site” is meant a nucleic-acid sequence that is capable of being recognized by a gene-editing protein, DNA-binding protein, DNA-binding domain or a biologically active fragment or variant thereof or a nucleic-acid sequence for which a gene-editing protein, DNA-binding protein, DNA-binding domain or a biologically active fragment or variant thereof has high affinity, by way of non-limiting example, an about 20-base-pair sequence of DNA in exon 1 of the human BIRC5 gene.

[0614] By “target” is meant a nucleic acid that contains a binding site.

[0615] By “liposome” is meant an entity containing amphiphilic molecules, hydrophobic molecules, or a mixture thereof, that is at least transiently stable in an aqueous environment, by way of non-limiting example, a micelle, a unilamellar bilayer with aqueous interior, a multilamellar bilayer, a lipid nanoparticle, any of the foregoing complexed with one or more nucleic acids, or a stable nucleic acid lipid particle.

[0616] By “PEGylated” is meant covalently or otherwise stably bound to a poly(ethylene glycol) chain of any length or any molecular weight.

[0617] By “safe harbor locus” is meant a genomic site capable of accommodating the integration of new genetic material such that the integrated inserted genetic elements function predictably and/or do not cause alterations of the host genome which pose a risk to the host cell or organism.

[0618] Other relevant definitions, aspects, and embodiments are set forth in WO2013/086008, WO2014/071219, WO2015/117021, WO2016/131052, and WO2018/035377, the contents of which are hereby incorporated by reference in their entireties.

Selected Sequences

| SEQ ID NO | Description |
|---|---|
| 1 | Stsl |
| 2 | Stsl-HA |
| 3 | Stsl-HA2 |
| 4 | Stsl-UHA |
| 5 | Stsl-UHA2 |
| 6 | Stsl-HF |
| 7 | Stsl-UHF |
| 8 | Oct4 |
| 9 | Sox2 |
| 10 | Klf4 |
| 11 | c-Myc |
| 12 | BIRC5_exon1 |
| 13 | BIRC5_exon2 |
| 14 | BIRC5_exon3 |
| 15 | BIRC5_exon4 |
| 16 | BIRC5-1.1-L |
| 17 | BIRC5-1.1-R |
| 18 | BIRC5-1.2-L |
| 19 | BIRC5-1.2-R |
| 20 | BIRC5-1.3-L |
| 21 | BIRC5-1.3-R |
| 22 | BIRC5-2.1-L |
| 23 | BIRC5-2.1-R |
| 24 | BIRC5-2.2-L |
| 25 | BIRC5-2.2-R |
| 26 | BIRC5-3.1-L |
| 27 | BIRC5-3.1-R |
| 28 | CDK1 |
| 29 | CDK2 |
| 30 | CDK3 |
| 31 | CDK4 |
| 32 | CDK5 |
| 33 | CDK6 |
| 34 | BIRC5 |
| 35 | HIF1A |
| 36 | RRM2 |
| 37 | KRAS |
| 38 | EGFR |
| 39 | MYC |
| 40 | PKN3 |
| 41 | KIF11 |
| 42 | APC |
| 43 | BRCA1 |
| 44 | BRCA2 |
| 45 | TP53 |
| 46 | APP |
| 47 | HIT |
| 48 | IAPP |
| 49 | MAPT |
| 50 | PRNP |
| 51 | SNCA |
| 52 | SOD1 |
| 53 | Fokl |
| 54 | Repeat1 |
| 55 | Repeat2 |
| 56 | Repeat3 |
| 57 | EO-GHGG-Fokl (“GHGG” disclosed as SEQ ID NO: |
| | 547) |
| 58 | GHGG-Fokl (“GHGG” disclosed as SEQ ID NO: 547) |
| 59 | EO-GHGG-Stsl (“GHGG” disclosed as SEQ ID NO: |
| | 547) |
| 60 | GHGG-Stsl (“GHGG” disclosed as SEQ ID NO: 547) |
| 61 | collagen alpha-1(I) chain preproprotein |
| 62 | collagen alpha-2(I) chain precursor |
| 63 | collagen alpha-1(II) chain isoform 1 precursor |
| 64 | collagen alpha-1(II) chain isoform 2 precursor |
| 65 | collagen alpha-1(III) chain preproprotein |
| 66 | collagen alpha-1(IV) chain preproprotein |
| 67 | collagen alpha-2(IV) chain preproprotein |
| 68 | collagen alpha-3(IV) chain precursor |
| 69 | collagen alpha-4(IV) chain precursor |
| 70 | collagen alpha-5(IV) chain isoform 1 precursor |
| 71 | collagen alpha-6(IV) chain isoform A precursor |
| 72 | collagen alpha-1(V) chain isoform 1 preproprotein |
| 73 | collagen alpha-2(V) chain preproprotein |
| 74 | collagen alpha-3(V) chain preproprotein |
| 75 | collagen alpha-1(VI) chain precursor |
| 76 | collagen alpha-2(VI) chain isoform 2C2 precursor |
| 77 | collagen alpha-3(VI) chain isoform 1 precursor |
| 78 | collagen alpha-1(VII) chain precursor |
| 79 | elastin isoform a precursor |
| 80 | elastin isoform b precursor |
| 81 | elastin isoform c precursor |
| 82 | elastin isoform d precursor |
| 83 | elastin isoform e precursor |
| 84 | elastin isoform f precursor |
| 85 | elastin isoform g precursor |
| 86 | elastin isoform h precursor |
| 87 | elastin isoform i precursor |
| 88 | elastin isoform j precursor |
| 89 | elastin isoform k precursor |
| 90 | elastin isoform l precursor |
| 91 | elastin isoform m precursor |
| 92 | protein-lysine 6-oxidase isoform 1 preproprotein |
| 93 | protein-lysine 6-oxidase isoform 2 |
| 94 | telomerase reverse transcriptase isoform 1 |
| 95 | telomerase reverse transcriptase isoform 2 |
| 96 | fibronectin isoform 1 preproprotein |
| 97 | fibronectin isoform 3 preproprotein |
| 98 | fibronectin isoform 4 preproprotein |
| 99 | fibronectin isoform 5 preproprotein |
| 100 | fibronectin isoform 6 preproprotein |
| 101 | fibronectin isoform 7 preproprotein |
| 102 | vitronectin precursor |
| 103 | nidogen-1 precursor |
| 104 | laminin subunit alpha-1 precursor |
| 105 | insulin-like growth factor I isoform 1 preproprotein |
| 106 | fibroblast growth factor 1 isoform 1 precursor |
| 107 | fibroblast growth factor 2 |
| 108 | transforming growth factor beta-1 precursor |
| 109 | transforming growth factor beta-2 isoform 1 precursor |
| 110 | transforming growth factor beta-2 isoform 2 precursor |
| 111 | actin, alpha skeletal muscle |
| 112 | actin, aortic smooth muscle |
| 113 | actin, cytoplasmic 1 |
| 114 | actin, alpha cardiac muscle 1 proprotein |
| 115 | actin, cytoplasmic 2 |
| 116 | actin, gamma-enteric smooth muscle isoform 1 precursor |
| 117 | actin, gamma-enteric smooth muscle isoform 2 precursor |
| 118 | granulocyte colony-stimulating factor isoform a precursor |
| 119 | granulocyte colony-stimulating factor isoform b precursor |
| 120 | granulocyte colony-stimulating factor isoform c precursor |
| 121 | granulocyte colony-stimulating factor isoform d precursor |
| 122 | platelet-derived growth factor subunit A isoform 1 |
| | preproprotein |
| 123 | platelet-derived growth factor subunit A isoform 2 |
| | preproprotein |
| 124 | platelet-derived growth factor subunit B isoform 1 |
| | preproprotein |
| 125 | platelet-derived growth factor subunit B isoform 2 |
| | preproprotein |
| 126 | platelet-derived growth factor C precursor |
| 127 | platelet-derived growth factor D isoform 1 precursor |
| 128 | platelet-derived growth factor D isoform 2 precursor |
| 129 | interstitial collagenase isoform 1 preproprotein |
| 130 | interstitial collagenase isoform 2 |
| 131 | neutrophil collagenase preproprotein |
| 132 | stromelysin-2 preproprotein |
| 133 | macrophage metalloelastase preproprotein |
| 134 | fibrillin-1 precursor |
| 135 | fibrillin-2 precursor |
| 136 | lysyl oxidase homolog 1 preproprotein |
| 137 | lysyl oxidase homolog 2 precursor |
| 138 | lysyl oxidase homolog 3 isoform 1 precursor |
| 139 | lysyl oxidase homolog 3 isoform 2 precursor |
| 140 | lysyl oxidase homolog 3 isoform 3 |
| 141 | lysyl oxidase homolog 4 precursor |
| 142 | microfibrillar-associated protein 2 isoform a precursor |
| 143 | microfibrillar-associated protein 2 isoform b precursor |
| 144 | microfibrillar-associated protein 5 precursor |
| 145 | disintegrin and metalloproteinase domain-containing |
| | protein 17 preprotein |
| 146 | desmoglein-2 preproprotein |
| 147 | DNA polymerase eta isoform 1 |
| 148 | DNA polymerase eta isoform 2 |
| 149 | DNA polymerase eta isoform 3 |
| 150 | ferrochelatase, mitochondrial isoform a precursor |
| 151 | ferrochelatase, mitochondrial isoform b precursor |
| 152 | filaggrin |
| 153 | hyaluronan synthase 1 isoform 1 |
| 154 | hyaluronan synthase 1 isoform 2 |
| 155 | hyaluronan synthase 2 |
| 156 | hyaluronan synthase 3 isoform a |
| 157 | hyaluronan synthase 3 isoform b |
| 158 | proopiomelanocortin |
| 159 | plakophilin-1 isoform 1a |
| 160 | plakophilin-1 isoform 1b |
| 161 | retinol dehydrogenase 10 |
| 162 | mitochondrial brown fat uncoupling protein 1 |
| 163 | tyrosinase precursor |
| 164 | erythropoietin |
| 165 | epoetin alfa |
| 166 | darbepoetin alfa |
| 167 | NOVEPOETIN |
| 168 | NOVECRIT |

[0619] This invention is further illustrated by the following non-limiting examples.

### EXAMPLES

### Example 1 RNA Synthesis

[0620] RNA encoding green fluorescent protein (“GFP”), NOVEPOETIN (“EPO”), elastin (“ELN”), tyrosinase (“TYR”), melanocortin-1-receptor (“MC1R”), HAS1, HAS2, HAS3, COL3A1, COL7A1, COL1A1, COL1A2, hTERT, Holly GFP, Fresno RFP, mRFP, Blitzen Blue, RIBOSLICE gene-editing proteins, TALENs, Cas9, Oct4, Sox2, Klf4, c-Myc-2 (T58A), Lin28, IL2, IL6, IL15, IL22, BMP2, BMP7, BDNF, LIF, BMP6, IL15RA, FGF21, LIF, PTH, KRT5, KRT5-GFP, KRT14, KRT14-GFP, GDF15 and ESM1, and comprising various combinations of canonical and non-canonical nucleotides, was synthesized from DNA templates using the T7 High Yield RNA Synthesis Kit and the Vaccinia Capping System kit with mRNA Cap 2′-O-Methyltransferase (all from New England Biolabs, Inc.), according to the manufacturer's instructions and the present inventors' previously disclosed inventions (U.S. application Ser. No. 13/465,490 (now U.S. Pat. No. 8,497,124), International Application No. PCT/US12/67966, U.S. application Ser. No. 13/931,251, International Application No. PCT/US13/68118, and International Application No. PCT/US2015/013949, the contents of all of which are hereby incorporated by reference in their entirety) (Table 4). The RNA was then diluted with nuclease-free water to between 100 ng/μL and 2000 ng/μL. For certain experiments, an RNase inhibitor (Superaseln, Life Technologies Corporation) was added at a concentration of 1 μL/100 μg of RNA. RNA solutions were stored at room temperature, 4° C., −20° C. or −80° C. For reprogramming experiments, RNA encoding Oct4, Sox2, Klf4, c-Myc-2 (T58A), and Lin28 was mixed ata molar ratio of 3:1:1:1:1.

TABLE 4
RNA Synthesis

| | | Reaction | ivT |
|---|---|---|---|
| Template | Nucleotides | Volume/μL | Yield/μg |
| ELN | A, 0.5 7dG, 0.4 5mU, | 20 | 34.1 |
| | 5mC | | |
| ELN | A, 0.5 7dG, 0.4 5mU, | 20 | 67.6 |
| | 5mC | | |
| GFP | A, 0.5 7dG, 0.4 5mU, | 10 | 60.5 |
| | 5mC | | |
| GFP | A, 0.5 7dG, 0.4 5mU, | 10 | 25.5 |
| | 5hmC | | |
| GFP | A, G, U, 5hmC | 10 | 58.3 |
| GFP | A, 0.5 7dG, U, 5hmC | 10 | 47.3 |
| GFP | A, 0.5 7dG, 0.4 5mU, | 10 | 33.8 |
| | 5cC | | |
| GFP | A, G, U, 5hmC | 15 | 30.3 |
| GFP | A, G, U, 5hmC | 15 | 44.6 |
| GFP | A, G, U, 5hmC | 15 | 24.7 |
| TYR | A, G, U, 5hmC | 15 | 45.4 |
| MC1R | A, G, U, 5hmC | 15 | 47.5 |
| TYR | A, G, U, C | 20 | 67.0 |
| TYR | A, G, psU, C | 20 | 93.7 |
| TYR | A, G, 0.4 5mU, C | 20 | 85.7 |
| TYR | A, G, U, 5mC | 20 | 73.4 |
| TYR | A, G, U, 5hmC | 20 | 72.7 |
| TYR | A, 0.5 7dG, U, C | 20 | 62.7 |
| TYR | A, G, psU, 5mC | 20 | 116.3 |
| TYR | A, G, psU, 5hmC | 20 | 102.4 |
| TYR | A, 0.5 7dG, psU, C | 20 | 87.3 |
| TYR | A, G, 0.4 5mU, 5mC | 20 | 106.5 |
| TYR | A, G, 0.4 5mU, 5hmC | 20 | 85.0 |
| TYR | A, 0.5 7dG, 0.4 5mU, | 20 | 70.9 |
| | C | | |
| TYR | A, 0.5 7dG, U, 5mC | 20 | 88.5 |
| TYR | A, 0.5 7dG, U, 5hmC | 20 | 59.1 |
| TYR | A, 0.5 7dG, psU, 5mC | 20 | 7.8 |
| TYR | A, 0.5 7dG, psU, | 20 | 98.0 |
| | 5hmC | | |
| TYR | A, 0.5 7dG, 0.4 5mU, | 20 | 106.5 |
| | 5mC | | |
| TYR | A, 0.5 7dG, 0.4 5mU, | 20 | 82.3 |
| | 5hmC | | |
| HAS1 | A, G, U, 5hmC | 20 | 178.4 |
| HAS2 | A, G, U, 5hmC | 20 | 59.3 |
| HAS3 | A, G, U, 5hmC | 20 | 102.6 |
| TYR | A, G, 0.4 5mU, 5hmC | 100 | 377.3 |
| COL3A1 | A, G, 0.4 5mU, 5hmC | 20 | 108.3 |
| COL7A1 | A, G, 0.4 5mU, 5hmC | 20 | 94.6 |
| COL1A1 (20 μL) | A, G, 0.4 5mU, 5hmC | 20 | 114.0 |
| COL1A2 (10 μL) | A, G, 0.4 5mU, 5hmC | 10 | 31.3 |
| TYR | A, G, 0.4 5mU, 5hmC | 100 | 249.9 |
| GFP | A, G, 0.4 5mU, 5hmC | 100 | 264.0 |
| hTERT | A, G, 0.4 5mU, 5hmC | 100 | 349.2 |
| GFP | A, G, U, 5hC | 20 | 81.7 |
| GFP | A, G, U, 0.5 5hC | 20 | 65.4 |
| GFP | A, sG, U, C | 20 | 34.7 |
| GFP | A, 0.5 sG, U, C | 20 | 47.5 |
| GFP | A, G, 5hmU, C | 20 | 22.1 |
| GFP | A, G, 0.5 5hmU, C | 20 | 28.4 |
| GFP | A, G, 5cU, C | 20 | 24.4 |
| GFP | A, G, 0.5 5cU, C | 20 | 28.4 |
| GFP | A, G, 5moU, C | 20 | 39.2 |
| GFP | A, G, 0.5 5moU, C | 20 | 34.2 |
| GFP | A, G, U, C | 20 | 42.0 |
| GFP | A, G, 5moU, C | 20 | 53.8 |
| GFP | A, G, 5moU, 5hmC | 20 | 101.5 |
| GFP | A, G, 0.4 5mU, 0.6 | 20 | 98.6 |
| | 5moU, C | | |
| GFP | A, G, 0.4 5mU, C | 20 | 99.6 |
| GFP | A, G, U, 5mC | 20 | 106.1 |
| GFP | A, G, U, C | 20 | 85.7 |
| GFP | A, G, 5moU, C | 100 | 398.4 |
| hTERT | A, G, 5moU, C | 20 | 82.6 |
| COL7A1 | A, G, 5moU, C | 20 | 34.9 |
| COL7A1 | A, G, 5moU, C | 100 | 342.0 |
| Holly GFP | A, G, 5moU, C | 20 | 36.7 |
| Fresno RFP | A, G, 5moU, C | 20 | 72.0 |
| Blitzen Blue | A, G, 5moU, C | 20 | 30.3 |
| hTERT | A, G, 5moU, C | 20 | 49.6 |
| Cas9 | A, G, 5moU, C | 20 | 31.6 |
| EPO | A, G, U, C | 20 | 101.0 |
| EPO | A, G, 5moU, C | 20 | 52.9 |
| EPO | A, G, psU, C | 20 | 106.0 |
| COL7A1 | A, G, 5moU, C | 20 | 80.2 |
| Oct4 (SEQ ID NO: 8) | A, G, 5moU, C | 300 | 1925.5 |
| Sox2 (SEQ ID NO: 9) | A, G, 5moU, C | 100 | 641.8 |
| Klf4 (SEQ ID NO: 10) | A, G, 5moU, C | 100 | 739.0 |
| c-Myc-2 (T58A) | A, G, 5moU, C | 100 | 574.0 |
| Lin28 | A, G, 5moU, C | 100 | 556.0 |
| IL2 | A, G, 5moU, C | 20 | 62.4 |
| IL6 | A, G, 5moU, C | 20 | 22.2 |
| IL15 | A, G, 5moU, C | 20 | 50.4 |
| IL22 | A, G, 5moU, C | 20 | 63.6 |
| BMP2 | A, G, 5moU, C | 20 | 83.2 |
| BDNF | A, G, 5moU, C | 20 | 45.0 |
| LIF | A, G, 5moU, C | 20 | 54.0 |
| BMP6 | A, G, 5moU, C | 20 | 92.2 |
| IL15RA | A, G, 5moU, C | 20 | 91.4 |
| FGF21 | A, G, 5moU, C | 20 | 79.2 |
| GFP | A, G, 5moU, C | 40 | 181.0 |
| IL2 | A, G, 5moU, C | 30 | 99.4 |
| IL6 | A, G, 5moU, C | 30 | 31.2 |
| IL15 | A, G, 5moU, C | 30 | 89.8 |
| IL22 | A, G, 5moU, C | 30 | 104.0 |
| BDNF | A, G, 5moU, C | 30 | 95.9 |
| BMP2 | A, G, 5moU, C | 30 | 112.0 |
| LIF | A, G, 5moU, C | 30 | 116.0 |
| PTH | A, G, 5moU, C | 30 | 88.4 |
| EPO | A, G, 5moU, C | 30 | 83.3 |
| KRT5 | A, G, 5moU, C | 15 | 66.6 |
| KRT5-GFP | A, G, 5moU, C | 15 | 81.1 |
| KRT14 | A, G, 5moU, C | 15 | 75.1 |
| KRT14-GFP | A, G, 5moU, C | 15 | 90.4 |
| GDF15 | A, G, 5moU, C | 15 | 71.1 |
| A1AT TALEN L | A, G, 5moU, C | 15 | 56.4 |
| A1AT TALEN R | A, G, 5moU, C | 15 | 57.3 |
| A1AT RIBOSLICE L_A | A, G, 5moU, C | 15 | 74.3 |
| A1AT RIBOSLICE L_B | A, G, 5moU, C | 15 | 56.4 |
| A1AT RIBOSLICE R_A | A, G, 5moU, C | 15 | 60.3 |
| A1AT RIBOSLICE R_B | A, G, 5moU, C | 15 | 35.7 |
| COL7A1 exon 73 | A, G, 5moU, C | 15 | 86.48 |
| TALEN L | | | |
| COL7A1 exon 73 | A, G, 5moU, C | 15 | 83.66 |
| TALEN R | | | |
| COL7A1 exon 73 rs3L | A, G, 5moU, C | 15 | 103.4 |
| 50A | | | |
| COL7A1 exon 73 rs3L | A, G, 5moU, C | 15 | 112.8 |
| 50B | | | |
| COL7A1 exon 73 rs3R | A, G, 5moU, C | 15 | 81.404 |
| 50A | | | |
| COL7A1 exon 73 rs3R | A, G, 5moU, C | 15 | 78.02 |
| 50B | | | |
| COL7A1 exon 73 | A, G, 5moU, C | 15 | 88.924 |
| TALEN L EA | | | |
| COL7A1 exon 73 | A, G, 5moU, C | 15 | 75.2 |
| TALEN L Het | | | |
| COL7A1 exon 73 | A, G, 5moU, C | 15 | 86.48 |
| TALEN R EA | | | |
| COL7A1 exon 73 | A, G, 5moU, C | 15 | 62.98 |
| TALEN R Het | | | |
| COL7A1 exon 73 | A, G, 5moU, C | 15 | 82.7 |
| TALEN L EA/Het | | | |
| COL7A1 exon 73 | A, G, 5moU, C | 15 | 69.7 |
| TALEN R EA/Het | | | |
| HBB exon 1 TALEN L | A, G, 5moU, C | 15 | 112.8 |
| HBB exon 1 TALEN R | A, G, 5moU, C | 15 | 108.1 |
| PD-1 exon 1 TALEN L | A, G, 5moU, C | 15 | 95.88 |
| PD-1 exon 1 TALEN R | A, G, 5moU, C | 15 | 101.52 |
| ESM1-transcript variant 1 | A, G, 5moU, C | 15 | 61 |
| ESM1-transcript variant 2 | A, G, 5moU, C | 15 | 66 |
| COL7A1 exon 73 | A, G, 5moU, C | 15 | 107.16 |
| spliceMod TALEN 1L | | | |
| COL7A1 exon 73 | A, G, 5moU, C | 15 | 95.88 |
| spliceMod TALEN 2L | | | |
| COL7A1 exon 73 | A, G, 5moU, C | 15 | 101.52 |
| spliceMod TALEN 3L | | | |
| COL7A1 exon 73 | A, G, 5moU, C | 15 | 99.64 |
| spliceMod TALEN 4L | | | |
| COL7A1 exon 73 | A, G, 5moU, C | 15 | 107.16 |
| spliceMod TALEN 1R | | | |
| COL7A1 exon 73 | A, G, 5moU, C | 15 | 103.4 |
| spliceMod TALEN 2R | | | |
| COL7A1 exon 73 | A, G, 5moU, C | 15 | 97.76 |
| spliceMod TALEN 3R | | | |
| COL7A1 exon 73 | A, G, 5moU, C | 15 | 95.88 |
| spliceMod RIBOSLICE | | | |
| L2A | | | |
| COL7A1 exon 73 | A, G, 5moU, C | 15 | 99.64 |
| spliceMod RIBOSLICE | | | |
| L2B | | | |
| COL7A1 exon 73 | A, G, 5moU, C | 15 | 103.4 |
| spliceMod RIBOSLICE | | | |
| R2A | | | |
| COL7A1 exon 73 | A, G, 5moU, C | 15 | 99.64 |
| spliceMod RIBOSLICE | | | |
| R2B | | | |

“A” refers to adenosine-5′-triphosphate,
“G” refers to guanosine-5′-triphosphate,
“U” refers to uridine-5′-triphosphate,
“C” refers to cytidine-5′-triphosphate,
“7dG” refers to 7-deazaguanosine-5′-triphosphate,
“sG” refers to thienoguanosine-5′-triphosphate,
“5mC” refers to 5-methylcytidine-5′-triphosphate,
“5hmC” refers to 5-hydroxymethylcytidine-5′-triphosphate,
“5cC” refers to 5-carboxycytidine-5′-triphosphate,
“5fC” refers to 5-formylcytidine-5′-triphosphate,
“5hC” refers to 5-hydroxycytidine-5-triphosphate,
“psU” refers to 5-pseudouridine-5′-triphosphate,
“5mU” refers to 5-methyluridine-5′-triphosphate,
“5hmU” refers to 5-hydroxymethyluddine-5′-triphosphate,
“5cU” refers to 5-carboxyuridine-5′-triphosphate, and
“5moU” refers to 5-methoxyuridine-5′-triphosphate.

### Example 2 Preparation of RNA-Transfection-Reagent Complexes

[0621] For each microgram of RNA, 1 μg RNA and 1 μL transfection reagent (LIPOFECTAMINE 3000, Life Technologies Corporation) were first diluted separately in complexation medium (Opti-MEM, Life Technologies Corporation or DMEM/F12+10 μg/mL insulin+5.5 μg/mL transferrin+6.7 ng/mL sodium selenite+2 μg/mL ethanolamine) to a total volume of between 5 μL and 100 μL each. Diluted RNA and transfection reagent were then mixed and incubated for 10 min at room temperature, according to the transfection reagent-manufacturer's instructions.

### Example 3 Transfection of Cells with Synthetic RNA

[0622] Complexes were prepared according to Example 2, and were then added directly to cells in culture. For transfection in 6-well plates, between 10 μL and 250 μL of complexes were added to each well of the 6-well plate, which already contained 2 mL of transfection medium per well. Plates were shaken gently to distribute the complexes throughout the well. Cells were incubated with complexes for 4 hours to overnight, before replacing the medium with fresh transfection medium (2 mL/well). Alternatively, the medium was not replaced. Volumes were scaled for transfection in 24-well and 96-well plates.

### Example 4 Toxicity of and Protein Translation from Synthetic RNA Containing Non-Canonical Nucleotides

[0623] Primary human fibroblasts were transfected according to Example 2, using RNA synthesized according to Example 1. Cells were fixed and stained 20-24 h after transfection using an antibody against Oct4. The relative toxicity of the RNA was determined by assessing cell density at the time of fixation.

### Example 5 Delivery of Synthetic RNA to the Skin

[0624] The complexation reaction shown in Table 5 was prepared using RNA encoding green fluorescent protein (GFP) or collagen, type VII, alpha (COL7), synthesized according to Example 1. The concentration of the RNA stock solution was 500 μg/mL.

TABLE 5
RNA Complexation Reaction

| | Volume |
|---|---|
| RNA solution tube | |
| GFP or COL7 RNA | 8 μL |
| FactorPlex ™ complexation buffer | 42 μL |
| Transfection reagent solution tube | |
| LIPOFECTAMINE 3000 (LIFE TECHNOLOGIES) | 4 μL |
| FactorPlex ™ complexation buffer | 46 μL |

[0625] Each tube was mixed by pipetting, and the transfection reagent solution tube was incubated for 30 s at room temperature. The transfection reagent solution was then transferred to the RNA solution, and the contents were mixed by rapidly pipetting up and down 10 times. Following a 10 min incubation, dilutions were prepared according to

TABLE 6
Injection Solutions

| | | Complexation | FactorPlex ™ | RNA |
|---|---|---|---|---|
| Site | RNA | Volume | Volume | amount |
| 1 | GFP | 7.5 μL | 22.5 μL | 0.3 μg |
| 2 | GFP | 15 μL | 15 μL | 0.6 μg |
| 3 | GFP | 30 μL | 0 μL | 1.2 μg |
| 4 | COL7 | 30 μL | 0 μL | 1.2 μg |

[0626] For each injection, the corresponding solution was drawn into a 3 cc insulin syringe with an 8 mm, 31-gauge needle (Becton, Dickinson and Company, Part Number: 328291) and air bubbles were removed. A clear field was selected on the left forearm of a healthy 33-year-old male human subject, and was disinfected with 70% isopropanol and allowed to dry. The needle was positioned at an angle of approximately 10° to the anterior (palmar) forearm with bevel facing up, and was inserted until the bevel was just covered. 30 μL of the RNA solution was injected intradermally over the course of approximately 10 sec. A distinct wheal appeared during the injection process. The needle was withdrawn, the wheal remained for approximately 1 minute, and no fluid escaped from the injection site. A total of 4 injections were performed according to Table 6, and all of the injections were performed between 11 and 28 minutes following the preparation of the RNA complexation reaction. No swelling, redness, or soreness occurred as a result of the injections. A small amount of bleeding occurred when the needle was removed from sites 2 and 4, resulting in the appearance of a small red spot at these sites.

[0627] The injection sites were imaged according to the schedule of Table 7, and every 24 hours thereafter for 6 days. Fluorescence images were acquired using an inverted microscope (Nikon Eclipse TS100) equipped with an EXFO X-Cite™ 120 fluorescence illumination system and the filter sets shown in Table 7. Fluorescence images were captured using a Sony NEX-7 digital camera (FIG. 1 to FIG. 6).

TABLE 7
Measurement Parameters

| Site | Time | Image Type | Exposure Time |
|---|---|---|---|
| All | 0 h | Brightfield | Automatic |
| 1 | 0 h | FITC | 1/10 s |
| 2 | 0 h | FITC | 1/10 s |
| 3 | 0 h | FITC | 1/10 s |
| 4 | 0 h | FITC | 1/10 s |
| 1 | 12 h | FITC | 1/10 s |
| 2 | 12 h | FITC | 1/10 s |
| 3 | 12 h | FITC | 1/10 s |
| 4 | 12 h | FITC | 1/10 s |
| 1 | 12 h | FITC | 1/20 s |
| 2 | 12 h | FITC | 1/20 s |
| 3 | 12 h | FITC | 1/20 s |
| 4 | 12 h | FITC | 1/20 s |
| All | 24 h | Brightfield | Automatic |
| 1 | 24 h | FITC | 1/20 s |
| 2 | 24 h | FITC | 1/20 s |
| 3 | 24 h | FITC | 1/20 s |
| 4 | 24 h | FITC | 1/20 s |
| 1 | 24 h | Cy3.5 | 1/5 s |
| 2 | 24 h | Cy3.5 | 1/5 s |
| 3 | 24 h | Cy3.5 | 1/5 s |
| 4 | 24 h | Cy3.5 | 1/5 s |
| 1 | 24 h | Cy3 | 1/5 s |
| 2 | 24 h | Cy3 | 1/5 s |
| 3 | 24 h | Cy3 | 1/5 s |
| 4 | 24 h | Cy3 | 1/5 s |
| 1 | 36 h | FITC | 1/20 s |
| 2 | 36 h | FITC | 1/20 s |
| 3 | 36 h | FITC | 1/20 s |
| 4 | 36 h | FITC | 1/20 s |
| 1 | 48 h | FITC | 1/20 s |
| 2 | 48 h | FITC | 1/20 s |
| 3 | 48 h | FITC | 1/20 s |
| 4 | 48 h | FITC | 1/20 s |

[0628] An independent experiment was carried out using the 1.2 μg dose of GFP RNA, with similar results (FIG. 7A).

[0629] FIG. 7B depicts intradermal injection of RNA encoding GFP, formulated for intradermal injection, into the ventral forearm of the subject in FIG. 1, 48 months following the injection of FIG. 1. The arrow indicates an approximately 1 cm² area of GFP expression at the site of injection.

TABLE 8
Filter Sets

| Image Type | Filter Set |
|---|---|
| Cy3 | Chroma SP102V2 |
| Cy3.5 | Chroma SP103V2 |
| FITC | Chroma SP101 |

### Example 6 High-Efficiency Gene Editing by Repeated Transfection with RIBOSLICE

[0630] Primary human fibroblasts were plated in 6-well plates coated with recombinant human fibronectin and recombinant human vitronectin (each diluted in DMEM/F12 to a concentration of 1 μg/mL, 1 mL/well, and incubated at room temperature for 1 h) at a density of 10,000 cells/well in transfection medium. The following day, the cells were transfected as in Example 2 with RNA synthesized according to Example 1. The following day cells in one of the wells were transfected a second time. Two days after the second transfection, the efficiency of gene editing was measured using a mutation-specific nuclease assay.

### Example 7 Transfection of Cells with Synthetic RNA Containing Non-Canonical Nucleotides and DNA Encoding a Repair Template

[0631] For transfection in 6-well plates, 1 μg RNA encoding gene-editing proteins targeting exon 16 of the human APP gene, 1 μg single-stranded repair template DNA containing a PstI restriction site that was not present in the target cells, and 6 μL transfection reagent (LIPOFECTAMINE RNAiMAX, Life Technologies Corporation) were first diluted separately in complexation medium (Opti-MEM, Life Technologies Corporation) to a total volume of 120 μL. Diluted RNA, repair template, and transfection reagent were then mixed and incubated for 15 min at room temperature, according to the transfection reagent-manufacturer's instructions. Complexes were added to cells in culture. Approximately 120 μL of complexes were added to each well of a 6-well plate, which already contained 2 mL of transfection medium per well. Plates were shaken gently to distribute the complexes throughout the well. Cells were incubated with complexes for 4 hours to overnight, before replacing the medium with fresh transfection medium (2 mL/well). The next day, the medium was changed to DMEM+10% FBS. Two days after transfection, genomic DNA was isolated and purified. A region within the APP gene was amplified by PCR, and the amplified product was digested with PstI and analyzed by gel electrophoresis.

### Example 8 Reprogramming Human Fibroblasts Using Synthetic RNA Containing Non-Canonical Nucleotides

[0632] Primary human neonatal fibroblasts were plated in 6-well plates coated with recombinant human fibronectin and recombinant human vitronectin (each diluted in DMEM/F12 to a concentration of 11. tg/mL, 1 mL/well, and incubated at room temperature for 1 h) at a density of 10,000 cells/well in transfection medium. The following day, the cells were transfected as in Example 2, using RNA containing A, 0.5 7 dG, 0.5 5 mU, and 5 mC, and an RNA dose of 0.5 μg/well on day 1, 0.5 μg/well on day 2, 2 μg/well on day 3, 2 μg/well on day 4, and 4 μg/well on day 5. Small colonies of cells exhibiting morphology consistent with reprogramming became visible as early as day 5. The medium was replaced with maintenance medium on day 6. Cells were stained using an antibody against Oct4. Oct4-positive colonies of cells exhibiting a morphology consistent with reprogramming were visible throughout the well (FIG. 8).

### Example 9 Screening of Reagents for Delivery of Nucleic Acids to Cells

[0633] Delivery reagents including polyethyleneimine (PEI), various commercial lipid-based transfection reagents, a peptide-based transfection reagent (N-TER, Sigma-Aldrich Co. LLC.), and several lipid-based and sterol-based delivery reagents were screened for transfection efficiency and toxicity in vitro. Delivery reagents were complexed with RIBOSLICE BIRC5-1.2, and complexes were delivered to HeLa cells in culture. Toxicity was assessed by analyzing cell density 24 h after transfection. Transfection efficiency was assessed by analyzing morphological changes. The tested reagents exhibited a wide range of toxicities and transfection efficiencies. Reagents containing a higher proportion of ester bonds exhibited lower toxicities than reagents containing a lower proportion of ester bonds or no ester bonds.

### Example 10 High-Concentration Liposomal RIBOSLICE

[0634] High-Concentration Liposomal RIBOSLICE was prepared by mixing 1 μg RNA at 500 ng/μL with 3 μL of complexation medium (Opti-MEM, Life Technologies Corporation), and 2.5 μL of transfection reagent (LIPOFECTAMINE 2000, Life Technologies Corporation) per μg of RNA with 2.5 μL of complexation medium. Diluted RNA and transfection reagent were then mixed and incubated for 10 min at room temperature to form High-Concentration Liposomal RIBOSLICE. Alternatively, a transfection reagent containing DOSPA or DOSPER is used.

### Example 11 Liposome Formulation and Nucleic-Acid Encapsulation

[0635] Liposomes are prepared using the following formulation: 3.2 mg/mL N-(carbonyl-ethoxypolyethylene glycol 2000)-1,2-distearoyl-sn-glycero-3-phosphoethanolamine (MPEG2000-DSPE), 9.6 mg/mL fully hydrogenated phosphatidylcholine, 3.2 mg/mL cholesterol, 2 mg/mL ammonium sulfate, and histidine as a buffer. pH is controlled using sodium hydroxide and isotonicity is maintained using sucrose. To form liposomes, lipids are mixed in an organic solvent, dried, hydrated with agitation, and sized by extrusion through a polycarbonate filter with a mean pore size of 800 nm. Nucleic acids are encapsulated by combining 10 μg of the liposome formulation per 1 μg of nucleic acid and incubating at room temperature for 5 minutes.

### Example 12 Folate-Targeted Liposome Formulation

[0636] Liposomes are prepared using the following formulation: 3.2 mg/mL N-(carbonyl-ethoxypolyethylene glycol 2000)-1,2-distearoyl-sn-glycero-3-phosphoethanolamine (MPEG2000-DSPE), 9.6 mg/mL fully hydrogenated phosphatidylcholine, 3.2 mg/mL cholesterol, 2 mg/mL ammonium sulfate, and histidine as a buffer, with 0.27 mg/mL 1,2-distearoyl-sn-glycero-3-phosphoethanolamine-N-[folate(polyethylene glycol)-5000] (FA-MPEG5000-DSPE) added to the lipid mixture. pH is controlled using sodium hydroxide and isotonicity is maintained using sucrose. To form liposomes, lipids are mixed in an organic solvent, dried, hydrated with agitation, and sized by extrusion through a polycarbonate filter with a mean pore size of 800 nm. Nucleic acids are encapsulated by combining 10 μg of the liposome formulation per 1 μg of nucleic acid and incubating at room temperature for 5 minutes.

### Example 13 Therapy Comprising Liposomal Protein-Encoding RNA

[0637] Liposomes encapsulating synthetic RNA encoding a therapeutic protein, synthesized according to Example 1, are prepared according to Example 11 or Example 12. The liposomes are administered by injection or intravenous infusion.

### Example 14 Storage and Stability of Synthetic RNA Complexes

[0638] A complexation reaction using RNA encoding GFP was prepared according to Example 5. Following the 10 min incubation, the complexation reaction was divided into three equal parts, one of which was diluted 1:10 in FactorPlex™ complexation medium, one of which was diluted 1:10 in sterile, nuclease-free water, and one of which was left undiluted. Each of the three parts was then further divided into four equal parts, one of which was applied to primary human dermal fibroblasts according to Example 3, one of which was left at room temperature for six hours before applying to primary human dermal fibroblasts according to Example 3, one of which was placed at 4° C. for six hours before applying to primary human dermal fibroblasts according to Example 3, and one of which was snap frozen in liquid nitrogen and placed at −80° C. for six hours before applying to primary human dermal fibroblasts according to Example 3. The cells were imaged using a fluorescence microscope approximately 24 hours after the first transfection (FIG. 9). All wells contained GFP-positive cells, demonstrating that the synthetic RNA complexes were stable and maintained activity in all of the storage conditions tested.

### Example 15: Gene Editing of A1AT, COL7A1, HBB, and PD-1

[0639] With reference to Example 1, Table 4, the following templates and targets were used:

| | | SEQ ID |
|---|---|---|
| Template | Target Sequence | NO: |
| A1AT TALEN L | TGCCTGGTCCCTGTCTCCCT | 615 |
| A1AT TALEN R | TGTCTTCTGGGCAGCATCTC | 616 |
| A1AT RIBOSLICE L_A | TGCCTGGTCCCTGTCTCCCT | 615 |
| A1AT RIBOSLICE L_B | TGCCTGGTCCCTGTCTCCCT | 615 |
| A1AT RIBOSLICE R_A | TGTCTTCTGGGCAGCATCTC | 616 |
| A1AT RIBOSLICE R_B | TGTCTTCTGGGCAGCATCTC | 616 |
| COL7A1 exon 73 TALEN L | TATTCCCGGGCTCCCAGGCA | 622 |
| COL7A1 exon 73 TALEN R | TCTCCTGGCCTTCCTGCCTC | 612 |
| COL7A1 exon 73 rs3L 50A | TATTCCCGGGCTCCCAGGCA | 622 |
| COL7A1 exon 73 rs3L 50B | TATTCCCGGGCTCCCAGGCA | 622 |
| COL7A1 exon 73 rs3R 50A | TCTCCTGGCCTTCCTGCCTC | 612 |
| COL7A1 exon 73 rs3R 50B | TCTCCTGGCCTTCCTGCCTC | 612 |
| COL7A1 exon 73 TALEN L | TATTCCCGGGCTCCCAGGCA | 622 |
| EA | | |
| COL7A1 exon 73 TALEN L | TATTCCCGGGCTCCCAGGCA | 622 |
| Het | | |
| COL7A1 exon 73 TALEN R | TCTCCTGGCCTTCCTGCCTC | 612 |
| EA | | |
| COL7A1 exon 73 TALEN R | TCTCCTGGCCTTCCTGCCTC | 612 |
| Het | | |
| COL7A1 exon 73 TALEN L | TATTCCCGGGCTCCCAGGCA | 622 |
| EA/Het | | |
| COL7A1 exon 73 TALEN R | TCTCCTGGCCTTCCTGCCTC | 612 |
| EA/Het | | |
| HBB exon 1 TALEN L | TGGTGCATCTGACTCCTGAG | 623 |
| HBB exon 1 TALEN R | TCACCTTGCCCCACAGGGCA | 624 |
| PD-1 exon 1 TALEN L | TCCAGGCATGCAGATCCCAC | 625 |
| PD-1 exon 1 TALEN R | TTGTAGCACCGCCCAGACGA | 626 |
| TTR (forward (top) and | TGCTGTCCGAGGCAGTCCTG | 639; 640 |
| reverse (bottom) | TCAGCAGCCTTTCTGAACAC | |
| TTR (forward (top) and | TGTCCGAGGCAGTCCTGCCA | 641; 642 |
| reverse (bottom) | TCAGCAGCCTTTCTGAACAC | |
| TTR (forward (top) and | TCCGAGGCAGTCCTGCCATC | 643; 644 |
| reverse (bottom) | TCAGCAGCCTTTCTGAACAC | |
| TTR (forward (top) and | TGTCCGAGGCAGTCCTGCCA | 645; 646 |
| reverse (bottom) | TCATCAGCAGCCTTTCTGAA | |
| TTR (forward (top) and | TCCGAGGCAGTCCTGCCATC | 647; 648 |
| reverse (bottom) | TCATCAGCAGCCTTTCTGAA | |
| TTR (forward (top) and | TCCGAGGCAGTCCTGCCATC | 649; 650 |
| reverse (bottom) | TGTCATCAGCAGCCTTTCTG | |

[0640] About 100,000 primary human neonatal epidermal keratinocytes were plated in EpiLife+Supplement S7 and transfected according to Example 3 with RNA encoding gene-editing proteins that target the sequences L: TGCCTGGTCCCTGTCTCCCT (SEQ ID NO: 615) and R: TGTCTTCTGGGCAGCATCTC (SEQ ID NO: 616), which were located approximately 75 bp from the Alpha-1-Antitrypsin (A1AT) start codon. Cells were gene edited, and gene-editing efficiency was measured as previously described. Results as shown in FIG. 10 demonstrate efficient gene-editing by the gene editing proteins.

[0641] About 100,000 primary human neonatal epidermal keratinocytes were plated in EpiLife+Supplement S7 and transfected according to Example 3 with RNA encoding gene-editing proteins that target the sequences L: TATTCCCGGGCTCCCAGGCA (SEQ ID NO: 622) and R: TCTCCTGGCCTTCCTGCCTC (SEQ ID NO: 612), which were located near the end of exon 73 of COL7A1. Cells were gene edited, and gene-editing efficiency was measured as previously described. Results as shown in FIG. 11 demonstrate efficient gene-editing by the gene editing proteins.

[0642] About 50,000 primary human neonatal epidermal keratinocytes were plated in EpiLife+Supplement S7 and transfected according to Example 3 with RNA encoding various gene-editing proteins that target the sequences L: TATTCCCGGGCTCCCAGGCA (SEQ ID NO: 622) and R: TCTCCTGGCCTTCCTGCCTC (SEQ ID NO: 612), which were located near the end of exon 73 of COL7A1. In particular, the gene-editing proteins comprised the endonuclease cleavage domain of FokI and variants thereof. The variants included a FokI variant with enhanced activity (S35P, K58E), a FokI heterodimer (i.e., L: Q103E, N113D, I116L; and R: E107K, H154R, 1155K), and a combination thereof (i.e., L: S35P, K58E, Q103E, N113D, I116L; and R: S35P, K58E, E107K, H154R, 1155K). Cells were gene edited, and gene-editing efficiency was measured as previously described. Results as shown in FIG. 12 demonstrate efficient gene-editing by the gene editing proteins.

[0643] About 100,000 primary human neonatal epidermal keratinocytes (animal-protein free) were plated in EpiLife+Supplement S7. Cells were transfected according to Example 3 with 2 μg RNA encoding the HBB exon 1 TALEN L and HBB exon 1 TALEN R gene-editing proteins (1 μg each). 48 hours after transfection, DNA was harvested and analyzed for gene editing (T7E1 assay; forward primer: gccaaggacaggtacggctgtcatc (SEQ ID NO: 627); reverse primer: cttgccatgagccttcaccttagggttg (SEQ ID NO: 628); product size: 518 nt; predicted band sizes: 300 nt, 218 nt). Results as shown in FIG. 13 demonstrate efficient gene-editing by the gene editing proteins.

[0644] About 100,000 primary human neonatal epidermal keratinocytes (animal-protein free) were plated in EpiLife+Supplement S7. Cells were transfected according to Example 3 with 2 μg RNA encoding the PD1 exon 1 TALEN L and PD1 exon 1 TALEN R gene-editing proteins (1 μg each). After 48 hours, DNA was harvested and analyzed for gene editing (T7E1 assay; forward primer: tcctctgtctccctgtctctgtctctctctc (SEQ ID NO: 594); reverse primer: ggacttgggccaggggaggag (SEQ ID NO: 595); product size: 612 nt; predicted band sizes: 349 nt, 263 nt). Results as shown in FIG. 14 demonstrate efficient gene-editing by the gene editing proteins.

### Example 16 Liposome Formulation Using Microfluidics

[0645] A liposome preparation used to encapsulate nucleic acids comprising 50 mol % (DLin-MC3-DMA), 38.5 mol % cholesterol, 10 mol % (DSPC), and 1.5 mol % (DMG-PEG) or 1.5 mol % (DMPE-PEG), was prepared as follows: Lipids were dissolved in absolute ethanol to a total lipid concentration of 12.5 mM. RNA prepared according to Example 1 was diluted to 228 ng/μL in 50 mM citrate buffer, pH 3.0 (Teknova). The solutions were applied to a Nanoassemblr Spark cartridge (Precision Nanosystems) according to the manufacturer's instructions, and were mixed through a microfluidic channel by the Spark at a 3:1 volume ratio of the aqueous to organic solutions. Dilution into phosphate-buffered saline (1×PBS, Ambion) was performed immediately after formulation.

[0646] Liposomal encapsulation efficiency was determined by fluorometric analysis. Formulated RNA was quantitated with a Qubit broad-range RNA kit (Invitrogen) in the presence (total RNA) or absence (unencapsulated RNA) of 1% Triton X-100. The encapsulation efficiency, calculated as encapsulated RNA as a percentage of total RNA, is shown in FIG. 15.

[0647] Liposome-formulated RNA was added dropwise to 20,000 human epidermal keratinocytes (HEKn) or fully-differentiated human adipocytes in each well of a 24-well plate, at 0.05 to 3.0 μg/well.

### Example 17 Liposome Formulation for In Vivo Injection

[0648] A liposome preparation comprising 30 mol % DODAP, 30 mol % DOPE, and 40 mol % cholesterol, was prepared as follows: Lipids were diluted from stocks in ethanol to a final concentration of 37.5 mM total lipid at the indicated molar ratios. RNA encoding GFP was diluted to 411 ng/μL in 50 mM citrate buffer, pH 3.0. Both solutions were transferred to syringes and assembled into a Nanoassemblr Benchtop (Precision Nanosystems) as directed by the manufacturer. The instrument was used to mix the aqueous and organic solutions at a 3:1 flowrate ratio (aqueous:organic) and a total flow rate of 20 mL/min. The resulting liposomes were diluted 3:1 in PBS, pH 7.4 (Ambion) and used without further modification.

### Example 18 Formulation of RIBOSLICE for In Vitro Gene Editing

[0649] Synthetic RNAs encoding RIBOSLICE were prepared according to the method of Example 1 and were mixed in 50 mM citrate buffer, pH 3.0 (Teknova) to a final concentration of 137 ng/μL. Lipid stocks in ethanol were diluted in ethanol to a final molar ratio of 30 mol % DODAP, 30 mol % DOPE, 39.75 mol % cholesterol, 0.25 mol % DMPE-PEG, and a total lipid concentration of 12.5 mM. The solutions were applied to a Nanoassemblr Spark cartridge (Precision Nanosystems) and liposomes were formed in the instrument per the manufacturer's directions. The resulting liposomes were collected and immediately diluted in PBS (Ambion).

[0650] Liposomes comprising 2 μg of RNA were applied dropwise to 50,000 HEKn in one well of a 6-well plate. After 48 hours, gene editing efficiency was assayed using a mutation-specific nuclease (T7E1). Results of this assay are depicted in FIG. 16.

### Example 19 In Vivo RIBOSLICE Safety Study

[0651] 40 female NCr nu/nu mice were injected subcutaneously with 5×10⁶ MDA-MB-231 tumor cells in 50% Matrigel (BD Biosciences). Cell injection volume was 0.2 mL/mouse. The age of the mice at the start of the study was 8 to 12 weeks. A pair match was conducted, and animals were divided into 4 groups of 10 animals each when the tumors reached an average size of 100-150 mm³, and treatment was begun. Body weight was measured every day for the first 5 days, and then biweekly to the end of the study. Treatment consisted of RIBOSLICE BIRC5-1.2 complexed with a vehicle (LIPOFECTAMINE 2000, Life Technologies Corporation). To prepare the dosing solution for each group, 308 μL of complexation buffer (Opti-MEM, Life Technologies Corporation) was pipetted into each of two sterile, RNase-free 1.5 mL tubes. 22 μL of RIBOSLICE BIRC5-1.2 (500 ng/μL) was added to one of the two tubes, and the contents of the tube were mixed by pipetting. 22 μL of vehicle was added to the second tube. The contents of the second tube were mixed, and then transferred to the first tube, and mixed with the contents of the first tube by pipetting to form complexes. Complexes were incubated at room temperature for 10 min. During the incubation, syringes were loaded. Animals were injected either intravenously or intratumorally with a total dose of 1 μg RNA/animal in 60 μL total volume/animal. A total of 5 treatments were given, with injections performed every other day. Doses were not adjusted for body weight. Animals were followed for 17 days. No significant reduction in mean body weight was observed, demonstrating the in vivo safety of RIBOSLICE gene-editing RNA.

### Example 20 In Vivo RIBOSLICE Efficacy Study—Subcutaneous Glioma Model

[0652] 40 female NCr nu/nu mice were injected subcutaneously with 1×10⁷ U-251 tumor cells. Cell injection volume was 0.2 mL/mouse. The age of the mice at the start of the study was 8 to 12 weeks. A pair match was conducted, and animals were divided into 4 groups of 10 animals each when the tumors reached an average size of 35-50 mm³, and treatment was begun. Body weight was measured every day for the first 5 days, and then biweekly to the end of the study. Caliper measurements were made biweekly, and tumor size was calculated. Treatment consisted of RIBOSLICE BIRC5-2.1 complexed with a vehicle (LIPOFECTAMINE 2000, Life Technologies Corporation). To prepare the dosing solution, 294 μL of complexation buffer (Opti-MEM, Life Technologies Corporation) was pipetted into a tube containing 196 μL of RIBOSLICE BIRC5-1.2 (500 ng/μL), and the contents of the tube were mixed by pipetting. 245 μL of complexation buffer was pipetted into a tube containing 245 μL of vehicle. The contents of the second tube were mixed, and then transferred to the first tube, and mixed with the contents of the first tube by pipetting to form complexes. Complexes were incubated at room temperature for 10 min. During the incubation, syringes were loaded. Animals were injected intratumorally with a total dose of either 2 μg or 5 μg RNA/animal in either 20 μL or 50 μL total volume/animal. A total of 5 treatments were given, with injections performed every other day. Doses were not adjusted for body weight. Animals were followed for 25 days.

### Example 21 Wound Healing Treatment

[0653] RNA encoding basic fibroblast growth factor or IL22 is prepared according to Example 1. The RNA is delivered by loading into a syringe and delivering the RNA by intradermal injection to the ventral forearm of a healthy 33-year-old male patient over the course of approximately 30 seconds or by exposing an area of skin to electrical pulses of between 10V and 155V and between approximately 10 milliseconds and approximately 1 second using a two-electrode array electrically connected to a capacitor, or by applying the RNA (with or without a liposome) directly to the skin, with or without disruption of the stratum corneum or injected intradermally or delivered by injection to the epidermis using a dose of one microgram or less per square centimeter. Optionally, an electric field is applied or a surface-contact patch to enhance delivery of the RNA is used.

### Example 22: Gene Editing of the COL7A1 Gene

[0654] The present RNA-based gene editing approaches were applied to the COL7A1 gene. This gene is of interest because, inter alia, it is frequently involved in dystrophic epidermolysis bullosa. FIG. 17 depicts a SURVEYOR assay using the DNA of primary adult human dermal fibroblasts transfected with RNA TALENs targeting the sequence TGAGCAGAAGTGGCTCAGTG (SEQ ID NO: 467) and TGGCTGTACAGCTACACCCC (SEQ ID NO: 468), located within the COL7A1 gene. The bands present in the +RNA lane indicate editing of a region of the gene that is frequently involved in dystrophic epidermolysis bullosa. FIG. 18 depicts another SURVEYOR assay using the DNA of primary adult human dermal fibroblasts transfected with RNA TALENs, now targeting the sequence TTCCACTCCTGCAGGGCCCC (SEQ ID NO: 469) and TCGCCCTTCAGCCCGCGTTC (SEQ ID NO: 470), located within the COL7A1 gene. The bands present in the +RNA lane indicate editing of a region of the gene that is frequently involved in dystrophic epidermolysis bullosa. This data points to, among others, a gene editing approach to the treatment of certain genetic disorders such as dystrophic epidermolysis bullosa.

### Example 23: Gene-Editing of the MYC Gene Using a Synthetic RNA with Non-Canonical Nucleotides

[0655] Experiments were conducted with in vitro transcribed synthetic RNA molecules containing non-canonical nucleotides and encoding gene-editing proteins. The immunogenicity and the gene-editing efficiency of in vitro transcribed synthetic RNA molecules having (1) only pseudouridine (psU) as a non-canonical nucleotide; (2) only 5-methylcytidine (5 mC) as a non-canonical nucleotide; and (3) both of pseudouridine and 5-methylcytidine as non-canonical nucleotides was evaluated (as well as controls).

[0656] Specifically, RNA containing the following nucleotide combinations: (i) A,G,U,C, (ii) A,G,psU,C, (iii) A,G,U, 5 mC, and (iv) A,G,psU, 5 mC, and encoding TALEN pairs targeting the following DNA sequences, which can be found within the MYC gene: TCGGCCGCCGCCAAGCTCGT (SEQ ID NO: 474) and TGCGCGCAGCCTGGTAGGAG (SEQ ID NO: 475), were synthesized according to the methods described herein. Human dermal fibroblasts (MA001SK) were plated in 6-well and 24-well tissue culture plates in DMEM with 10% FBS at 100,000 and 10,000 cells per well, respectively. The next day, the cells were transfected in the 6-well plate with 2 μg of RNA (1 μg for each component of the TALEN pair) and the cells were transfected in the 24-well plate with 0.2 μg of RNA (0.1 μg for each component of the TALEN pair) according to the methods described herein. 24 hours after transfection, the total RNA from the cells in the 24-well culture plate was isolated using an RNeasy Mini Kit (74106; QIAGEN), including isolating the total RNA from a sample of cells that had not been transfected with RNA (negative control; “Neg.” in FIG. 19). The genomic DNA was removed by a 15-minute digestion with DNase I (RNase-Free) (M0303L; NEW ENGLAND BIOLABS) and the reaction purified using an RNeasy Mini Kit. 1 μL of total RNA was used to assess gene expression by real-time RT-PCR using TAQMAN gene-expression assays (APPLIED BIOSYSTEMS) designed to detect expression of the immunogenicity markers TLR3, IFIT1, and IFIT2 (FIG. 19). The data were normalized to both the positive experimental control sample (“A,G,U,C”) and to a loading control (GAPDH).

[0657] 48 hours after transfection, the genomic DNA was isolated from the cells in the 6-well culture plate using a DNeasy Blood and Tissue Kit (69506; QIAGEN), including from a sample of cells that had not been transfected with RNA (negative control, “Neg.” in FIG. 20). A 970 bp region of the MYC gene surrounding the predicted TALEN cut location was amplified using a 35 cycle 2-step PCR reaction containing the following primers: TAACTCAAGACTGCCTCCCGCTTT (SEQ ID NO: 476) and AGCCCAAGGTTTCAGAGGTGATGA (SEQ ID NO: 477). 160 ng was hybridized in 5 μL of amplified sequence from RNA-treated cells to 160 ng in 5 μL of amplified sequences from untreated MA001SK cells by mixing the two sequences with 0.5 μL of 1M KCl and 0.5 μL of 25 mM MgCl₂ and running the following program in a thermocycler: 95° C. for 10 minutes; 95° C. to 85° C. at 0.625 C/s; 85° C. to 25° C. at 0.125 C/s. The SURVEYOR assay was performed by adding 0.5 μL of SURVEYOR nuclease and 0.5 μL of Enhancer from the SURVEYOR Mutation Detection Kit (7060201; INTEGRATED DNA TECHNOLOGIES) to the hybridized product, mixing, and incubating at 42° C. for 25 minutes. The protocol above was also used to process the positive control DNA sample provided with the SURVEYOR Mutation Detection Kit as a positive experimental control for the SURVEYOR Assay (“Assay Pos.” in FIG. 20). Samples were analyzed by agarose gel electrophoresis (FIG. 20). For each sample, gene-editing efficiency was calculated as a ratio of the intensity of the digested bands (indicated by “*” in FIG. 20) to that of the undigested band.

[0658] As shown in FIG. 19, the samples from cells transfected with the positive control RNA (A,G,U,C), and the samples from cells transfected with RNA containing either pseudouridine or 5-methylcytidine exhibited upregulation of all three of the immunogenicity markers TLR3, IFIT1, and IFIT2. The sample from cells transfected with RNA containing both pseudouridine and 5-methylcytidine exhibited negligible upregulation of the immunogenicity markers (less than 0.01-fold of the positive control), demonstrating that in vitro transcribed synthetic RNA with both pseudouridine and 5-methylcytidine and encoding a gene-editing protein can evade detection by the innate-immune system of mammalian cells.

[0659] Further, as shown in FIG. 20 below, the sample from cells transfected with RNA containing both pseudouridine and 5-methylcytidine exhibited highly efficient gene editing (41.7%), which was greater than the efficiency exhibited by samples from cells transfected with RNA containing pseudouridine alone (35.2%), demonstrating that in vitro transcribed synthetic RNA comprising both pseudouridine and 5-methylcytidine and encoding a gene-editing protein can both (i) gene-edit mammalian cells at high efficiency, and (ii) gene-edit mammalian cells at higher efficiency than in vitro transcribed synthetic RNA comprising pseudouridine and not comprising 5-methylcytidine.

### Example 24: COL7A1 Gene Editing and Repair in Human Cells

[0660] RNA encoding gene editing proteins targeting the following sequences in the COL7A1 gene was synthesized according to Example 1: TGAGCAGAAGTGGCTCAGTG (SEQ ID NO: 473) and TGGCTGTACAGCTACACCCC (SEQ ID NO: 468) (see also table below).

[0661] RNA Synthesis

| | | Reaction | ivT |
|---|---|---|---|
| Template | Nucleotides | Volume/μL | Yield/μg |
| COL7A1 TALEN 1L | A, G, 5moU, C | 20 | 120.528 |
| COL7A1 TALEN 1R | A, G, 5moU, C | 20 | 120.204 |
| COL7A1 TALEN 1L | A, G, 5moU, C | 15 | 81.94 |
| COL7A1 TALEN 1R | A, G, 5moU, C | 15 | 61.88 |

[0662] 50,000 primary human epidermal keratinocytes (HEKn, Gibco) were plated in wells of 6-well plates in EpiLife+Supplement S7. The next day, cells were transfected according to Example 3 with 1 μg of RNA encoding each component of the gene editing pair and 2 μg of a single-stranded DNA repair template having a length of 60, 70, 80, 90 or 100 nucleotides (“nt”). 48 hours after transfection, genomic DNA was purified. A segment of the COL7A1 gene was amplified using the primers GCATCTGCCCTGCGGGAGATC (SEQ ID NO: 478) and CCACGTTCTCCTTTCTCTCCCCGTTC (SEQ ID NO: 479), which produce a 535 bp amplicon. The efficiency of gene editing was assessed using T7 Endonuclease I (“T7E1”, New England Biolabs) according to the manufacturer's instructions. Bands of approximately 385 bp and 150 bp indicate successful gene editing. FIG. 21 and FIG. 22 show the result of digestion with T7E1, analyzed by agarose gel electrophoresis. FIG. 22 and FIG. 23 show the result of digestion with MluI-HF, analyzed by agarose gel electrophoresis. Because the repair template contains the sequence ACGCGT (SEQ ID NO: 480), digestion of the amplified product with MluI-HF (New England Biolabs) produces bands of approximately 385 bp and 150 bp in the case of successful gene repair.

[0663] RNA encoding gene editing proteins targeting the following sequences in the COL7A1 gene was synthesized according to Example 1: TGAGCAGAAGTGGCTCAGTG (SEQ ID NO: 473) and TGGCTGTACAGCTACACCCC (SEQ ID NO: 468). 50,000 primary human epidermal keratinocytes (HEKn, Gibco) were plated in wells of 6-well plates in EpiLife+Supplement S7. The next day, cells were transfected according to Example 3 with 1 μg of RNA encoding each component of the gene editing pair and 1-4 μg of an 80 nucleotide single-stranded DNA repair template. 48 hours after transfection, genomic DNA was purified. A segment of the COL7A1 gene was amplified using the primers GCATCTGCCCTGCGGGAGATC (SEQ ID NO: 481) and CCACGTTCTCCTTTCTCTCCCCGTTC (SEQ ID NO: 482), which produce a 535 bp amplicon. The efficiency of gene editing was assessed using T7 Endonuclease I (“T7E1”, New England Biolabs) according to the manufacturer's instructions. Bands of approximately 385 bp and 150 bp indicate successful gene editing. FIG. 24 show the result of digestion with T7EI, analyzed by agarose gel electrophoresis. FIG. 25 show the result of digestion with MluI-HF, analyzed by agarose gel electrophoresis. Because the repair template contains the sequence ACGCGT (SEQ ID NO: 480), digestion of the amplified product with MluI-HF (New England Biolabs) produces bands of approximately 385 bp and 150 bp in the case of successful gene repair.

### Example 25: Pharmacokinetic Study Via Intradermal Injection in Rats

[0664] Studies were conducted to evaluate the responses of Sprague Dawley rats to intradermal administration of various RNAs. Specifically, 8-10 weeks old, female Sprague Dawley rats weighing about 200 g to about 350 g were used for this study. A total of 33 rats were tested, and the animals were assigned to study groups and treated as indicated in the Table below:

| | | | | | | Dose | |
|---|---|---|---|---|---|---|---|
| | | | | | Dose | Volume | Number of |
| | Group | Test | Dose | Dose Level | Concentration | (μL/per | Animals |
| Group | Color | Article | Route | (μg) | (μg/mL) | injection)^{a} | Females |
| 1 | White | Control | ID | 4.0 | 20.0 | 200 | 3^{b} |
| | | (NOVEPOEITIN) | | | | (4 × 50) | |
| 2 | Yellow | TA1 (IL2) | ID | 4.0 | 20.0 | 200 | 3^{b} |
| | | | | | | (4 × 50) | |
| 3 | Green | TA2 (IL6) | ID | 4.0 | 20.0 | 200 | 3^{b} |
| | | | | | | (4 × 50) | |
| 4 | Blue | TA3 (IL15) | ID | 4.0 | 10.0 | 200 | 3^{b} |
| | | | | | | (4 × 50) | |
| 5 | Red | TA4 | ID | 4.0 | 20.0 | 200 | 3^{b} |
| | | (IL15 + IL15RA) | | | (10.0 each) | (4 × 50) | |
| 6 | Dark Grey | TA5 (IL22) | ID | 4.0 | 20.0 | 200 | 3^{b} |
| | | | | | | (4 × 50) | |
| 7 | Purple | TA6 (BMP2) | ID | 4.0 | 20.0 | 200 | 3^{b} |
| | | | | | | (4 × 50) | |
| 8 | Black | TA7 (BDNF) | ID | 4.0 | 20.0 | 200 | 3^{b} |
| | | | | | | (4 × 50) | |
| 9 | White/ | TA8 (LIF) | ID | 4.0 | 20.0 | 200 | 3^{b} |
| | Yellow | | | | | (4 × 50) | |
| 10 | Green/ | TA9 (PTH) | ID | 4.0 | 20.0 | 200 | 3^{b} |
| | Blue | | | | | (4 × 50) | |
| 11 | Red/Dark | TA10 (FGF21) | ID | 4.0 | 20.0 | 200 | 3^{b} |
| | Grey | | | | | (4 × 50) | |

^{a}Total dose volume (μL/per animal) was constant. Each animal received four intradermal injections of 50 μL/per injection for a total of 200 μL per animal.
^{b}Animals, euthanized on Day 3 without examination or necropsy
Intradermal = ID

[0665] For the study, the animals were treated with 4 μg of RNA. All groups were dosed via intradermal injection. Each dose was administered in four intradermal injections of 50 μL/injection for a total of 200 μL per animal. Injections occurred into previously marked sites near the midline of the dorsal lumbar area (upper left, upper right, lower left and lower right quadrants). Dose time (after the last injection) was recorded. Additional markings were made as needed to allow for identification of the dose site. Animals were administered with the RNAs on day 1 and euthanized on day 3. Clinical observations were made on the rats twice daily. Food consumption and body weight were also monitored.

[0666] During the study, approximately 1 ml of blood samples was collected from the jugular vein for pharmacokinetic analysis as follows:

| Time Point | PK^{a} |
|---|---|
| Acclimation | — |
| Day 1 | 12 hours postdose |
| Day 2 | 24 hours postdose |
| Day 3 | 48 hours postdose |

^{a}Time points for blood collection (n = 3 animals/Group/Time point)
PK = Pharmacokinetics

[0667] Results indicate that following administration of RNAs encoding FGF21, IL15, IL15 and IL15R, IL6, IL22, and NOVEPOEITIN, these proteins were readily detected in the blood with protein levels peaking at approximately 12 hours post injection (FIG. 26). Of note, the proteins tested in this study can be taken up by cells and tissues and/or can exert an effect near the site of expression without appreciable accumulation in systemic circulation.

### Example 60: Gene Editing of COL7A1

[0668] With reference to Example 1, Table 4, the following templates and targets were used:

| | | SEQ ID |
|---|---|---|
| Template | Target Sequence | NO: |
| COL7A1 exon 73 spliceMod | TACAGCCACCAGCATTCTCT | 651 |
| TALEN L1 | | |
| COL7A1 exon 73 spliceMod | TGTACAGCCACCAGCATTCT | 652 |
| TALEN L2 | | |
| COL7A1 exon 73 spliceMod | TGGGGTGTAGCTGTACAGCC | 653 |
| TALEN L3 | | |
| COL7A1 exon 73 spliceMod | TGGAGTGGGGTGTAGCTGTA | 654 |
| TALEN L4 | | |
| COL7A1 exon 73 spliceMod | TCTCCAGGAAAGCCGATGGG | 655 |
| TALEN R1 | | |
| COL7A1 exon 73 spliceMod | TCCAGGAAAGCCGATGGGGC | 656 |
| TALEN R2 | | |
| COL7A1 exon 73 spliceMod | TGGGGCCCTGCAGGAGTGGA | 657 |
| TALEN R3 | | |

[0669] About 50,000 primary human neonatal epidermal keratinocytes (animal-protein free) were plated in EpiLife+Supplement S7. Cells were transfected according to Example 3 with 2 μg RNA encoding the COL7A1 exon 73 spliceMod TALEN L1-4 and COL7A1 exon 73 spliceMod TALEN R1-3 gene-editing proteins (1 μg each), in the following combinations: L1/R1, L1/R2, L2/R2, L3/R3, or L4/R3. After 48 hours, DNA was harvested and analyzed for gene editing (T7E1 assay; forward primer: GCATCTGCCCTGCGGGAGATC (SEQ ID NO: 478); reverse primer: CCACGTTCTCCTTTCTCTCCCCGTTC (SEQ ID NO: 479); product size: 535 nt; predicted band sizes: 203 nt, 332 nt for L1/R1; 202 nt, 333 nt for L1/R2; 201 nt, 334 nt for L2/R2; 189 nt, 346 nt for L3/R3; and 186 nt, 349 nt for L4/R3). Results shown in FIG. 27 demonstrate efficient gene editing by the gene-editing proteins.

### Example 27: Gene Editing of COL7A1 Using RIBOSLICE

[0670] With reference to Example 1, Table 4, the following templates and targets were used:

| | | SEQ ID |
|---|---|---|
| Template | Target Sequence | NO: |
| COL7A1 exon 73 spliceMod | TGTACAGCCACCAGCATTCT | 652 |
| TALEN L2 | | |
| COL7A1 exon 73 spliceMod | TCCAGGAAAGCCGATGGGGC | 656 |
| TALEN R2 | | |
| COL7A1 exon 73 spliceMod | TGTACAGCCACCAGCATTCT | 652 |
| RIBOSLICE L2A | | |
| COL7A1 exon 73 spliceMod | TGTACAGCCACCAGCATTCT | 652 |
| RIBOSLICE L2B | | |
| COL7A1 exon 73 spliceMod | TCCAGGAAAGCCGATGGGGC | 656 |
| RIBOSLICE R2A | | |
| COL7A1 exon 73 spliceMod | TCCAGGAAAGCCGATGGGGC | 656 |
| RIBOSLICE R2B | | |

[0671] About 50,000 primary human neonatal epidermal keratinocytes (animal-protein free) were plated in EpiLife+Supplement S7. Cells were transfected according to Example 3 with 2 μg RNA encoding the COL7A1 exon 73 spliceMod TALEN or RIBOSLICE gene-editing proteins (1 μg each), in the following combinations: RIBOSLICE L2A/RIBOSLICE R2A, RIBOSLICE L2B/RIBOSLICE R2B, and TALEN L2/TALEN R2. After 48 hours, DNA was harvested and analyzed for gene editing (T7E1 assay; forward primer: GCATCTGCCCTGCGGGAGATC (SEQ ID NO: 478); reverse primer: CCACGTTCTCCTTTCTCTCCCCGTTC (SEQ ID NO: 479); product size: 535 nt; predicted band sizes: 202 nt, 333 nt). Results shown in FIG. 28 demonstrate efficient gene editing by the gene-editing proteins.

### Example 28: Gene Editing of COL7A1 for Altering RNA Splicing

[0672] With reference to Example 1, Table 4, the following templates and targets were used:

| | | SEQ ID |
|---|---|---|
| Template | Target Sequence | NO: |
| COL7A1 exon 73 spliceMod | TACAGCCACCAGCATTCTCT | 651 |
| TALEN L1 | | |
| COL7A1 exon 73 spliceMod | TGTACAGCCACCAGCATTCT | 652 |
| TALEN L2 | | |
| COL7A1 exon 73 spliceMod | TGGGGTGTAGCTGTACAGCC | 653 |
| TALEN L3 | | |
| COL7A1 exon 73 spliceMod | TGGAGTGGGGTGTAGCTGTA | 654 |
| TALEN L4 | | |
| COL7A1 exon 73 spliceMod | TCTCCAGGAAAGCCGATGGG | 655 |
| TALEN R1 | | |
| COL7A1 exon 73 spliceMod | TCCAGGAAAGCCGATGGGGC | 656 |
| TALEN R2 | | |
| COL7A1 exon 73 spliceMod | TGGGGCCCTGCAGGAGTGGA | 657 |
| TALEN R3 | | |

[0673] About 50,000 primary human neonatal epidermal keratinocytes (animal-protein free) were plated in EpiLife+Supplement S7. Cells were transfected according to Example 3 with 2 μg RNA encoding the COL7A1 exon 73 spliceMod TALEN L1-4 and COL7A1 exon 73 spliceMod TALEN R1-3 gene-editing proteins (1 μg each), in the following combinations: L1/R1, L1/R2, L2/R2, L3/R3, L4/R3. After 48 hours, RNA was harvested. mRNA was reverse transcribed using ROCKETSCRIPT reverse transcriptase and the primer GCTCTCCTGGTAGACCCGGGTTG (SEQ ID NO: 658). The resulting product was amplified by PCR using the primer pair GGTTGCTGGAAACTGCTGGCATCAAGGCATCTG (SEQ ID NO: 659) and CACCCTTGAGTCCAGGGGGTCCCTGTTCTC (SEQ ID NO: 661) (This pair produces a product size of 513 nt if exon 73 is present in the spliced mRNA and a product size of 312 nt if exon 73 is not present in the spliced mRNA) and analyzed by gel electrophoresis. Results as shown in FIG. 29 demonstrate efficient removal of exon 73. To confirm the result, the reverse-transcription product was amplified using the primer pair GCATCTGCCCTGCGGGAGATC (SEQ ID NO: 478) and CCACGTTCTCCTTTCTCTCCCCGTTC (SEQ ID NO: 479) (This pair is predicted to produce a product size of 353 nt if exon 73 is present in the spliced mRNA and a product size of 152 nt if exon 73 is not present in the spliced mRNA) and analyzed by gel electrophoresis. Results shown in FIG. 30A demonstrate efficient removal of exon 73.

[0674] FIG. 30B depicts the results of an experiment in which 50,000 primary human neonatal epidermal keratinocytes (animal-protein free) were transfected with 2 μg RNA encoding the COL7A1 exon 73 splice acceptor-targeting pairs (target sequences: TGTACAGCCACCAGCATTCT (SEQ ID NO: 652) and TCCAGGAAAGCCGATGGGGC (SEQ ID NO: 656)) (1 μg each individual pair component) with mutations in the N-terminus of the protein. 1:156L, 2: K57R, 3: R61K, 4: A65G, 5: A70G, 6: K57E, 7. K57E and V60A. DNA was harvested after 48 h and analyzed for gene editing (T7E1 assay; forward primer: GCATCTGCCCTGCGGGAGATC (SEQ ID NO: 478), reverse primer: CCACGTTCTCCTTTCTCTCCCCGTTC (SEQ ID NO: 479), product size: 535 nt, predicted band sizes: 202 nt, 333 nt).

### Example 29: Time Course of Gene Editing of COL7A1 for Altering RNA Splicing

[0675] With reference to Example 1, Table 4, the following templates and targets were used:

| | | SEQ ID |
|---|---|---|
| Template | Target Sequence | NO: |
| COL7A1 exon 73 spliceMod | TGTACAGCCACCAGCATTCT | 652 |
| TALEN L2 | | |
| COL7A1 exon 73 spliceMod | TCCAGGAAAGCCGATGGGGC | 656 |
| TALEN R2 | | |

[0676] Four wells of about 50,000 primary human neonatal epidermal keratinocytes (animal-protein free) were plated in EpiLife+Supplement S7. Cells were transfected according to Example 3 with 2 μg RNA encoding the COL7A1 exon 73 spliceMod TALEN L2 and COL7A1 exon 73 spliceMod TALEN R2 gene-editing proteins (1 μg each). After 1, 3, and 5 days, RNA was harvested. The cells in the remaining well were cultured until near-senescence, 18 days after transfection, and RNA was harvested. mRNA was reverse transcribed using ROCKETSCRIPT reverse transcriptase and the primer GCTCTCCTGGTAGACCCGGGTTG (SEQ ID NO: 658). The resulting product was amplified by PCR using the primer pair GGTTGCTGGAAACTGCTGGCATCAAGGCATCTG (SEQ ID NO: 659) and CACCCTTGAGTCCAGGGGGTCCCTGTTCTC (SEQ ID NO: 661) (This pair is predicted to produce a product size of 513 nt if exon 73 is present in the spliced mRNA and a product size of 312 nt if exon 73 is not present in the spliced mRNA) and analyzed by gel electrophoresis. Results shown in FIG. 31 demonstrate efficient and persistent removal of exon 73.

### Example 30: Huntington Disease Therapy Comprising RNA Encoding Gene-Editing Proteins

[0677] RNA encoding one or more gene-editing proteins capable of creating one or more double-strand breaks in the following DNA sequence: TGCACTGCTGTCCTGCATTTCAGCATCTTCAGGATGCTGTGCAGCTGAAACATTTGATAACGGTGGAACTGT TCGTTATTTTGCAAGCCTGTGATTCCCTATTGAATGTTTTCTCTCGCCATTTGACAAATGAGTGTTTCTCTGTC TTCACCTCAGTGAAGGATGAGATCAGTGGAGAGCTGGCTGCTTCTTCAGGGGTTTCCACTCCAGGGTCAGC AGGTCATGACATCATCACAGAACAGCCACGGTC (SEQ ID NO: 708) are synthesized according to Example 1. RNA is formulated according to the methods of the present invention, and delivered by injection to the basal ganglia of a patient with Huntington's disease.

### Example 32: Gene-Editing Proteins Comprising DNA-Binding and Deaminase Activity

[0678] RNA encoding a gene-editing protein comprising two or more repeat sequences, followed by: BASE_EDIT_FRONT (SEQ ID NO: 587), followed by any of BASE_EDIT_ADA1 (SEQ ID NO: 588), BASE_EDIT_ADA2 (SEQ ID NO: 589), BASE_EDIT_ADA3 (SEQ ID NO: 590), BASE_EDIT_ADA4 (SEQ ID NO: 591), BASE_EDIT_CDA1 (SEQ ID NO: 592) and BASE_EDIT_CDA2 (SEQ ID NO: 593) is synthesized according to Example 1. The gene-editing protein is capable of correcting one or more mutations within 1 to 50 bases downstream of the target sequence.

### Example 33: Transfection of Human Keratinocytes with RNA Encoding BDNF, BMP-2, BMP-6, IL-2, IL-6, IL-15, IL-22, LIF or FGF-21

[0679] 100,000 human epidermal keratinocytes (HEK, Gibco) were plated in EpiLife+Supplement S7. Cells were transfected according to Example 3 with 2 μg of RNA encoding BDNF, BMP-2, BMP-6, IL-2, IL-6, IL-15, IL-22, LIF or FGF-21. 24 hours after transfection, the medium was sampled and secreted protein levels were measured using a human ELISA kit (see Table below) according the manufacturer's instructions. Secreted protein levels were determined by measuring 450 nm absorbance using a microplate reader (EMax Plus, Molecular Devices). Secreted protein levels are shown in FIG. 32, panels A-I.

| Protein | Part Number | Vendor |
|---|---|---|
| BDNF | DBNT00 | R&D Systems |
| BMP-2 | DBP200 | R&D Systems |
| BMP-6 | ab99984 | Abcam |
| IL-2 | D2050 | R&D Systems |
| IL-6 | D6050 | R&D Systems |
| IL-15 | D1500 | R&D Systems |
| IL-22 | D2200 | R&D Systems |
| LIF | DLF00 | R&D Systems |
| FGF-21 | DF2100 | R&D Systems |

### Example 33: Friedrich's Ataxia Therapy Comprising RNA Encoding Gene-Editing Proteins

[0680] RNA encoding one or more gene-editing proteins capable of creating one or more double-strand breaks in FXNA (SEQ ID NO: 582) and RNA encoding one or more gene-editing proteins capable of creating one or more double-strand breaks in FXNB (SEQ ID NO: 583) are synthesized according to Example 1. RNA is formulated according to the methods of the present invention, and delivered to the heart of a patient with Friedrich's ataxia using a catheter. Target-sequence pairs are selected from Pair 1: TCCCACACGTGTTATTTGGC (SEQ ID NO: 618) and TGGCAACCAATCCCAAAGTT (SEQ ID NO: 619); Pair 2: TAATAAATAAAAATAAAAAA (SEQ ID NO: 620) and TTGCCTATTTTTCCAGAGAT (SEQ ID NO: 621).

### Example 34: Liposomal Transfection of CNS Tissue

[0681] Cortical tissue from whole brains of embryonic day 18 Sprague Dawley rat embryos (BRAIN BITS LLC) was cut into sections of approximately 200 μm in thickness and placed onto 20 μL of gelled rat tail collagen in DMEM. RNA encoding mRFP was synthesized according to Example 1. RNA-transfection-reagent complexes with Opti-MEM and LIPOFECTAMINE 3000 were created according to Example 2. The sections were treated with a 5 μL volume containing 0.1 μg mRFP RNA-transfection-reagent complexes. The sections were covered with a second 20 μL layer of rat tail collagen in DMEM that was allowed to gel and then immersed in 500 μL of Neurobasal media with 2 mM GlutaMAX, 2% B-27 supplement and 1× antibiotic-antimycotic. Treated sections were incubated at 5% CO₂ and 37° C. for 16 h and then imaged by brightfield and fluorescent microscopy. Results shown in FIG. 33 demonstrate transfection of CNS tissue and expression of the encoded protein.

### Example 35: Liposomal Transfection of Cortical Neurons

[0682] Embryonic day 18 Sprague Dawley rat embryo (BRAINBITS LLC) cortical tissue was dissociated. 50,000-100,000 cells were cultured on a poly-D-lysine coated 24-well in 500 μL of Neurobasal media with 2 mM GlutaMAX, 2% B-27 supplement and 1× antibiotic-antimycotic. After 6 days, the cells were transfected with 0.05 μg RNA encoding mRFP or 1-5×10¹⁰ viral genomes of adeno associated virus serotype 2 packed with mRFP under a CMV promoter (AAV2-mRFP purchased from SignaGen, product #SL100853). RNA encoding mRFP was synthesized according to Example 1. RNA-transfection-reagent complexes with Opti-MEM and LIPOFECTAMINE 3000 were prepared according to Example 2. The cells were imaged every hour for the first 18 h and then every 6 h by brightfield and fluorescent microscopy using a PerkinElmer Operetta CLS system at 5% CO₂ and 37° C. The percent RFP positive cells was measured using PerkinElmer Harmony 4.6 software. Results as shown in FIG. 34 and FIG. 35 demonstrate transfection of cortical neurons within 4 hours with mRFP RNA.

### Example 36: Gene Editing of HTT

[0683] About 20,000 human neuroblastoma cells (SH-SY5Y) are plated in DMEM/F-12 media with 10% fetal bovine serum. Cells are transfected according to Example 3 with 0.5 μg RNA encoding gene-editing proteins (0.25 μg each) selected from the table below; pairs 1 to 17 recognize exon 12 of the Huntingtin (HTT) gene. 48 hours after transfection, DNA is harvested and analyzed for gene editing.

| | Forward Target | SEQ ID | Reverse Target | SEQ ID |
|---|---|---|---|---|
| Pair | Sequence | NO: | Sequence | NO: |
| 1 | TATTGAATGTTTTCTCTCGC | 674 | TGAGGTGAAGACAGAGAAAC | 675 |
| 2 | TATTGAATGTTTTCTCTCGC | 676 | TCACTGAGGTGAAGACAGAG | 677 |
| 3 | TGAATGTTTTCTCTCGCCAT | 678 | TCACTGAGGTGAAGACAGAG | 679 |
| 4 | TGAATGTTTTCTCTCGCCAT | 680 | TTCACTGAGGTGAAGACAGA | 681 |
| 5 | TGTTTTCTCTCGCCATTTGA | 682 | TCCTTCACTGAGGTGAAGAC | 683 |
| 6 | TTTTCTCTCGCCATTTGACA | 684 | TCCTTCACTGAGGTGAAGAC | 685 |
| 7 | TGTTTTCTCTCGCCATTTGA | 686 | TCATCCTTCACTGAGGTGAA | 687 |
| 8 | TTTCTCTCGCCATTTGACAA | 688 | TCATCCTTCACTGAGGTGAA | 689 |
| 9 | TCTCTCGCCATTTGACAAAT | 690 | TCATCCTTCACTGAGGTGAA | 691 |
| 10 | TCTCTCGCCATTTGACAAAT | 692 | TCTCATCCTTCACTGAGGTG | 693 |
| 11 | TCTCGCCATTTGACAAATGA | 694 | TCTCATCCTTCACTGAGGTG | 695 |
| 12 | TCTCTCGCCATTTGACAAAT | 696 | TGATCTCATCCTTCACTGAG | 697 |
| 13 | TCTCGCCATTTGACAAATGA | 698 | TGATCTCATCCTTCACTGAG | 699 |
| 14 | TCGCCATTTGACAAATGAGT | 700 | TGATCTCATCCTTCACTGAG | 701 |
| 15 | TTTGACAAATGAGTGTTTCT | 702 | TCCACTGATCTCATCCTTCA | 703 |
| 16 | TTTGACAAATGAGTGTTTCT | 704 | TCTCCACTGATCTCATCCTT | 705 |
| 17 | TGACAAATGAGTGTTTCTCT | 706 | TCTCCACTGATCTCATCCTT | 707 |

### Example 37: Gene Editing of HTT

[0684] 50,000 human neonatal epidermal keratinocytes (HEKn) were plated in EpiLife media supplemented with S7 (Gibco). Cells were transfected according to Example 3 with 2 μg RNA encoding gene-editing proteins (1 μg each) selected from the table below. 48 hours after transfection, DNA or RNA were harvested and analyzed for gene editing and splice modification using the T7E1 assay and RT-PCR, respectively. The appearance of 322 bp and 598 bp bands for pair 1/1 and 328 bp and 592 bp bands for pair 2/2 in the T7E1 assay indicated successful gene editing (FIG. 36). The appearance of a 236 bp band indicated successful splice modification by elimination of exon 12 from the HTT mRNA at both 3 days and 10 days.

| | Forward Target | Reverse Target |
|---|---|---|
| Pair | Sequence | Sequence |
| 1/1 | TTTGACAAATGAGTGTTTCT | TCTCCACTGATCTCATCCTT |
| | (SEQ ID NO: 710) | (SEQ ID NO: 711) |
| 2/2 | TCGCCATTTGACAAATGAGT | TGATCTCATCCTTCACTGAG |
| | (SEQ ID NO: 712) | (SEQ ID NO: 713) |

### Example 38: Localized In Vivo Protein Expression Using Directed Administration of mRNA

[0685] In this example, in vivo expression levels and expression patterns of an mRNA formulation delivered in vivo to the liver, hippocampus, intraventricular space, and intrathecal space was tested.

[0686] Two to three month old, male or female Sprague-Dawley rats were administered either a test article (of in vitro-transcribed mRNA encoding GFP, suspended in a buffer) or a control article (a control Buffer, comprising FactorPlex™ Buffer). Two days after administration, tissues were harvested and embedded in paraffin and sections were collected. Later, the sections were stained for the presence of GFP (via an anti-GFP antibody and visualized using horseradish peroxidase (HRP)/3,3′-Diaminobenzidine (DAB).

[0687] Rats in the liver expression experiments had a catheter inserted into their portal vein. Either the test article or control article was administration at 5 mL/kg IV via the indwelling cannula. GFP expression data is shown in FIG. 37.

[0688] Rats in the spinal cord expression experiments had an intrathecal catheter inserted. Test article or control article administration was performed via the indwelling cannula with a bolus injection of 10 μL administered over a period of 15-20 seconds. GFP expression data is shown in FIG. 38.

[0689] Rats in the lateral ventricle expression experiments and hippocampus expression experiments received a longitudinal, mid-scalp incision extending from the level of the eyes caudally for visualization of the bregma. The overlying tissue/muscle was retracted. The tip of the drill was placed in a position relative to the bregma for injections. The skull was drilled, taking care that only the bone was penetrated and the brain was uninjured. An appropriate syringe (Hamilton or equivalent) was be placed in position using the stereotactic frame. For administration to the lateral ventricle, the upper incisor bar was set at 3.3 mm below the interauricular line, with the bregma taken as A-P zero. The needle was placed at A −0.9, L −1.2 and V −3.6 mm. For administration to the Hippocampus, the needle was placed at AP −3.6, ML −2.2, and DV −3.2 mm from bregma. Test articles or control articles were injected slowly at 1 μL/minute for a total volume of 5 μL administered. Following the injection, the needle was left in place for 2 minutes before being raised to a depth of 1.5 mm. The needle was left in place for an additional minute at the 1.5 mm depth before complete removal. The burr hole was sealed with bone wax and the incision closed in layers using appropriate suture and materials (wound clips or equivalent). GFP expression data in the lateral ventricle is shown in FIG. 39 to FIG. 47. GFP expression data in the hippocampus is shown in FIG. 48 to FIG. 50.

[0690] These data show localized protein expression is achievable using directed administration of mRNA.

### Example 39: In Vivo Expression of Synthetic mRNA in Liver, Skin, Spinal Cord, and Brain

[0691] Experiments were conducted to examine in vivo expression levels and patterns of GFP expression from mRNA formulations delivered to the liver, neostriatum, intraventricular space, intrathecal space, and intradermal space.

[0692] Adult Sprague-Dawley rats were anesthetized and placed in an appropriate position (e.g., dorsal, lateral, or ventral recumbency) to facilitate the injection procedure. Warming devices were used to aid the animal in maintaining adequate body temperature while under anesthesia. The injection site(s) were aseptically prepared.

[0693] Animals were treated with mRNA (as lipid nanoparticles (LNPs) (mRNA-GFPA) or using LIPOFECTAMINE 3000 (mRNA-GFPB)) according to the parameters described in below the below table.

| | No. of | Description | | |
|---|---|---|---|---|
| Group | Animals | of Treatment | Dose | Dose Volume |
| 1 | 2 | Liver | 0.375 mg/kg | 5 mL/kg |
| | | infusion—mRNA- | | |
| | | GFP-A | | |
| 2 | 2 | Neostriatal | 0.375 μg/animal | 5 μL/animal |
| | | injection—mRNA- | | |
| | | GFP-A | | |
| 3 | 2 | Lateral ventricle | 0.375 μg/animal | 5 μL/animal |
| | | injection—mRNA- | | |
| | | GFP-A | | |
| 4 | 2 | Intrathecal | 0.75 μg/animal | 10 μL/animal |
| | | injection—mRNA- | | |
| | | GFP-A | | |
| 5 | 2 | Intradermal | 7.5 μg/animal | 100 μL/animal |
| | | Injection—mRNA- | | |
| | | GFP-A | | |
| 6 | 2 | Intradermal | 2 μg/animal | 100 μL/animal |
| | | Injection—mRNA- | | |
| | | GFP-B | | |

[0694] Animals in Group 1, which were treated with mRNA by liver infusion, had a portal vein catheter inserted. mRNA (5 mL/kg) was intravenously administered via the indwelling cannula.

[0695] Animals in Group 2 and 3, which were, respectively, treated with mRNA by injection into the Lateral Ventricle or Neostriatum had an incision made longitudinally in the mid-scalp extending from the level of the eyes caudally for visualization of the Bregma. The overlying tissue/muscle was be retracted. The tip of the drill was placed in a position relative to the Bregma, which is the anatomical point on the skull where the Coronal Suture intersects the Sagittal Suture. The skull was drilled, taking care that only the bone was penetrated and the brain was uninjured. The drill was removed and an appropriate syringe (Hamilton or equivalent) was positioned using a stereotactic frame.

[0696] For treatments to the Lateral Ventricle (Group 2 rats): The upper incisor bar was set at 3.3 mm below the interauricular line, and the bregma was taken as A-P zero. The needle was placed at A −0.9, L −1.2 and V −3.6 mm.

[0697] For treatments to the Neostriatum (Group 3 rats): AP 0.5-1, ML±2.5, DV 5.4-6 mm. mRNA was injected slowly at 1 μL/minute for a total volume of 5 μL.

[0698] Animals in Group 4, which were treated with mRNA by intrathecal injection, had an intrathecal catheter inserted. A bolus injection of 10 μL mRNA was administered via the indwelling cannula over a period of 15-20 seconds.

[0699] Animals in Groups 5 and 6, which were treated with mRNA by intradermal injection, were administered a bolus injection of 100 μL mRNA/animal with the injection site held off to prevent any leakage of material from the injection site. The injection site was marked with indelible marker to aid in necropsy tissue collections.

[0700] Rats were sacrificed on Day 2 (48±4 hours after treatment). Tissues were collected, paraffin embedded and sectioned. GFP protein was detected by immunocytochemistry.

[0701] As shown in FIG. 51 to FIG. 56, Group 2 rats (which received GFP mRNA treatments to the Lateral Ventricle) has GFP protein expression in cells lining the lateral ventricle.

[0702] These data show successful in vivo expression of synthetic mRNA of the present invention.

### Example 40: In Vivo Expression of Synthetic mRNA in the Eye

[0703] Experiments will be conducted to examine in vivo expression levels and patterns of GFP expression following intravitreal injection, subretinal injection, or topical administration of mRNA formulations in rabbits or rats.

[0704] Adult rats or rabbits will be anesthetized and injected with a synthetic mRNA formulation as in Example 39, according the parameters described in below table. For each animal in each group, one eye will receive the mRNA formulation via the intended route.

| | | | No. of | |
|---|---|---|---|---|
| | No. of | Description of | Treatments | Interim |
| Group | Animals | Treatment | per animal | Procedures |
| 1 | 2 (rabbit) | Unilateral intravitreal | 1 | Ophthalmic |
| | | injection, control buffer | examinations | |
| 2 | 2 (rabbit) | Unilateral intravitreal | 1 | Ophthalmic |
| | | injection, mRNA GFP-A | examinations | |
| 3 | 2 (rabbit) | Unilateral intravitreal | 1 | Ophthalmic |
| | | injection, mRNA GFP-B | examinations | |
| 4 | 4 (rat) | Unilateral subretinal | 1 | Ophthalmic |
| | | injection, GFP-A | examinations | |
| 5 | 4 (rat) | Unilateral subretinal | 1 | Ophthalmic |
| | | injection, GFP-B | | examinations |
| 6 | 2 (rabbit) | Unilateral topical | 1 | Ophthalmic |
| | | application, GFP-A | | examinations |
| 7 | 2 (rabbit) | Unilateral topical | 1 | Ophthalmic |
| | | application, GFP-B | | examinations |

[0705] 6 hours, 24 hours, and 48 hours after administration, eyes will be imaged using a fluorescent ophthalmic microscope.

[0706] Animals will be sacrificed on Day 2 (48±4 hours after treatment). Eye tissue will be collected, paraffin embedded and sectioned. GFP will be detected by immunocytochemistry.

### Example 41: Chronic Pain Therapy Comprising RNA Encoding Gene-Editing Proteins

[0707] RNA encoding one or more gene-editing proteins capable of creating one or more double-strand breaks in NaV1.3 (SCN3A, SEQ ID NO: 671), NaV1.7 (SC9N9A, SEQ ID NO: 662), NaV1.8 (SCN10A, SEQ ID NO: 672), and/or NaV1.9 (SCN11A, SEQ ID NO: 673) are synthesized according to Example 1. RNA is formulated according to the methods of the present invention, and delivered by injection to the dorsal root ganglia of a patient with chronic pain.

### Example 42: Gene Editing of NaV 1.7 in Human Cells

[0708] About 20,000 human neuroblastoma cells (SH-SY5Y) were plated in DMEM/F-12 media with 10% fetal bovine serum. Cells were transfected according to Example 3 with 0.5 μg RNA encoding the NaV 1.7 pairs 1, 2 or 3 gene-editing proteins (0.25 μg each): Pair 1: TCCATCCAGGCCTCTTATGT (SEQ ID NO: 663) and TCTTTTCATCCTGTATATTT (SEQ ID NO: 664); Pair 2: TGAAAAGATGGCAATGTTGC (SEQ ID NO: 665) and TGTGAAATGGACAAAGCTCT (SEQ ID NO: 666); Pair 3 TCCCCCAGGACCTCAGAGCT (SEQ ID NO: 667) and TTCAATGAGGGCAAGAGACT (SEQ ID NO: 668). 48 hours after transfection, DNA was harvested and analyzed for gene editing (T7E1 assay; forward primer: gatggaatcttctcctggtc, (SEQ ID NO: 669); reverse primer: aggaatgtccccatagatga, (SEQ ID NO: 670); product size: 725 nt; predicted band sizes: for pair 1: 495 nt and 230 nt, for pair 2: 544 nt and 181 nt, for pair 3: 567 nt and 158 nt). Results shown in FIG. 57 demonstrate efficient gene-editing by the pair 2 and pair 3 gene-editing proteins.

### Example 43: Generation and Characterization of Mesenchymal Stem Cells Differentiated from RNA-Reprogrammed Human Pluripotent Stem Cells

[0709] Primary human dermal fibroblasts were reprogrammed according to Example (Example 8) and differentiated using the STEMDIFF™ Mesenchymal Progenitor Kit (STEMCELL Technologies). Following differentiation, cells were stained with antibodies targeting Nanog, Sox2, CD73, and CD105 (FIG. 58). The differentiated cells and STEMPRO™ BM Mesenchymal Stem Cells (“MSC”; Thermo Fisher) were grown to approximately 90% confluency in 10 cm cell culture dishes and DNA was extracted. Telomere length was measured by Southern blot using the TELOTAGGG™ Telomere Length Assay Kit (Millipore-Sigma). The mean telomere length of the PSC-MSCs was observed to be much longer than that of the BM-MSCs (FIG. 59), and the proliferative capacity of the PSC-MSCs was observed to be much greater than that of the BM-MSCs (FIG. 60).

### Example 44: In Vivo Treatment of Experimental Autoimmune Encephalomyelitis, a Demyelinating Disease Model

[0710] Experiments will be conducted to examine in vivo consequences of Mesenchymal Stem Cells (MSC) cell transplantation for treating a model demyelinating disease.

[0711] Experimental autoimmune encephalomyelitis (EAE) is a central nervous system (CNS) autoimmune demyelinating disease that mimics many of the clinical and pathologic features of multiple sclerosis (MS). See, Gilgun-Sherki Y. et al., Neurosciences Research 47:201-207, 2003.

[0712] Here, in the so-called myelin oligodendrocyte glycoprotein (MOG) murine model, adult, female C57Bl/6J mice undergo a sensitization period, induced by a subcutaneous (SC) injection of MOG 200 μl/animal (at 2 mg/ml) emulsified in Complete Freund's adjuvant (“CFA”; containing heat-killed Mycobacterium tuberculosis H37 Ra) on Study Day 0, followed by intraperitoneal (IP) supplemental immunostimulation with pertussis toxin (“PT” of about 300 ng/mouse of a 2 μg/ml PT solution) on the first day of EAE induction (Study Day 0) and again 48 hours later (on Study Day 2). In these experiments, on Study Day 5 and/or Study Day 10, certain groups of mice (as described the below table), will be administered MSC (as described in Example 43) intravenously or intrathecally. Mice will be sacrificed on day 28 of the study.

| | Group | | MSC or PBS | Administration | Number of | Dosage of |
|---|---|---|---|---|---|---|
| | Size | Status | injected | route | Injections | PBS or MSC |
| Group 1 | N = 5 | Naive | N/A | N/A | 0 | N/A |
| Group 2 | N = 5 | Disease | PBS | Intravenous | 1 | 200 uL |
| | | Only | | | | |
| Group 3 | N = 5 | Disease | PBS | Intrathecal | 1 | 10 uL |
| | | Only | | | | |
| Group 4 | N = 5 | Disease | PBS | Intravenous | 2 | 200 uL |
| | | Only | | | | |
| Group 5 | N = 5 | Disease | PBS | Intrathecal | 2 | 10 uL |
| | | Only | | | | |
| Group 6 | N = 5 | Treated | MSC | Intravenous | 1 | 200 uL, |
| | | | | | | 500k cells |
| Group 7 | N = 5 | Treated | MSC | Intrathecal | 1 | 10 uL, |
| | | | | | | 100k cells |
| Group 8 | N = 5 | Treated | MSC | Intravenous | 2 | 200 uL, |
| | | | | | | 500k cells |
| Group 9 | N = 5 | Treated | MSC | Intrathecal | 2 | 10 uL, |
| | | | | | | 100k cells |
| Group 10 | N = 5 | Control | Dimethyl | Oral | 0 | 100 mg/kg |
| | | Treated | fumarate | | | |

[0713] Clinical signs will be assayed from Study Day 0 to termination day, on Study Day 28, and mice will be assigned a clinical score based on the criteria in the below table 1.

| Grade | Clinical sign | Comment |
|---|---|---|
| 0 | No clinical signs | Normal gait, tail moves and can be |
| | | raised, tail wraps around a round |
| | | object if mouse is held at the base |
| | | of the tail |
| 1 | Partially limp tail | Normal gait, tip of the tail droops |
| 2 | Paralyzed tail | Normal gait, tail droops |
| 3 | Hind limb paresis, | Uncoordinated gait, tail limps, hind |
| | uncoordinated | limbs respond to pinching |
| | movement | |
| 4 | One hind limb | Uncoordinated gait with one hind |
| | paralyzed | limb dragging, tail limps, one hind |
| | | limb does not respond to pinch |
| 5 | Both hind limbs | Uncoordinated gait with both hind |
| | paralyzed | limbs dragging, tail limps, both hind |
| | | limbs do not respond to pinch |
| 6 | Hind limbs paralyzed, | Uncoordinated gait with forelimbs |
| | weakness in forelimbs | struggle to pull body, forelimbs |
| | | reflex after pinching, tail limps |
| 7 | Hind limbs paralyzed, | Mouse cannot move, one forelimb |
| | one forelimb paralyzed | responds to toe pinch, tail limps |
| 8 | Hind limbs paralyzed, | Mouse cannot move, both forelimbs |
| | both forelimbs paralyzed | do not respond to toe pinch, tail |
| | | limps |
| 9 | Moribund | No movement, altered breathing |
| 10 | Death | |

[0714] After the mice are terminated on Study Day 28, tissues will be collected and assayed with Luxol fast blue stain (to stain myelin of spinal cord) and/or CD45 antibody stain.

### Example 45 Preparation of RNA with G-Substituted Poly(A) Tails

[0715] Single-stranded DNA oligomers comprising the desired tail sequence (see table below), flanked by EcoRI (5′) and Spel (3′) restriction sites, and random sequences to promote proper annealing, were designed and synthesized (Integrated DNA Technologies), as were the reverse complement sequences. 4 nmol oligomer was dissolved in 100 μL nuclease-free water and hybridized with its reverse complement by slow cooling from 95° C. to 4° C. over a period of 2-3 hours. The hybridized oligomer was digested with EcoRI and Spel (New England Biolabs) and cloned into a GFP or NOVEPOIETIN DNA template immediately 3′ of the 3′ UTR.

| Tail | Sequence |
|---|---|
| A₁₅₀ 0% G | (A)₁₅₀ (SEQ ID NO: 736) |
| A₁₅₀ 2.5% G | (A₃₉G)₃(A)₃₀ (SEQ ID NO: 737) |
| A₁₅₀ 5% G | (A₁₉G)₇(A)₁₀ (SEQ ID NO: 738) |
| A₁₅₀ 10% G | (A₉G)₁₅ (SEQ ID NO: 739) |

[0716] RNA was prepared by in vitro transcription from these templates according to Example 1, and was transfected into human epidermal keratinocytes (HEK) according to Example 3. Fluorescence data showing increased GFP expression in cells transfected with GFP with a poly(A) tail containing 5-10% G compared to those transfected with GFP tailed enzymatically (E. coli poly-A polymerase) are shown in FIG. 61. Expression of NOVEPOIETIN secreted into the culture medium was analyzed with an ELISA kit according to the manufacturer's instructions (01630, StemCell Technologies). Medium was changed every 24 hours. Expression levels are shown in FIG. 62.

### Example 46. Transfection of Keratinocytes with Synthetic RNA Containing Novel 3′-UTR Sequences

[0717] RNA encoding GFP and containing APOBEC3H, CD52, DMC1, EIF3E, GPR160, or RPS24 3′-UTRs (Respectively, SEQ ID NOs: 718, 720, 722, 724, 726, and 728) was synthesized according to Example 1. 50,000 or 100,000 neonatal human epidermal keratinocytes (HEKn) were plated in 6-well plates and were transfected with 1 μg RNA according to Example 2. After 6 hours, 24 hours, 48 hours, 72 hours, and 96 hours cells were evaluated for expression of GFP using fluorescence microscopy. At each time point, cells were trypsinized and evaluated for expression of GFP using flow cytometry. At each time point, samples of cells were lysed and mRNA was extracted and purified. GFP RNA was measured by rtPCR (Part Number 4331182, Thermo).

[0718] RNA encoding NOVEPOEITIN and containing APOBEC3H, CD52, DMC1, EIF3E, GPR160, or RPS24 3′-UTRs (Respectively, SEQ ID NOs: 718, 720, 722, 724, 726, and 728) was synthesized according to Example 1. 50,000 or 100,000 neonatal human epidermal keratinocytes (HEKn) were plated in 6-well plates and were transfected with 1 μg RNA according to Example 2. After 6 hours, 24 hours, 48 hours, 72 hours, and 96 hours cell media was evaluated for expression of NOVEPOEITIN using an ELISA kit (StemCell Technologies Part Number 01630)

### Example 47: Gene Editing HBB, PD-1, TRAC, and ADORA2A

[0719] RNA encoding gene editing proteins targeting the sequences TGGTGCATCTGACTCCTGAG (SEQ ID NO: 623) and TCACCTTGCCCCACAGGGCA (SEQ ID NO: 624) in the beta globin (HBB) gene were synthesized from DNA templates using the T7 High Yield RNA Synthesis Kit and the Vaccinia Capping System kit with mRNA Cap 2′-O-Methyltransferase (all from New England Biolabs, Inc.), according to the manufacturer's instructions and as previously described in, e.g., WO/2016/131052. The RNA was then diluted with nuclease-free water to between 100 ng/μL and 2000 ng/μL. RNA solutions were stored at room temperature, 4° C., −20° C., or −80° C. 200,000 Primary human cord blood CD34⁺ cells (70008.1, STEMCELL Technologies Inc.) were plated in a well of a 6-well plate in 1.8 mL of StemSpan SFEM 11(09605, STEMCELL Technologies Inc.)+0.2 mL of StemSpan 10× CD34⁺ Expansion Supplement (02691, STEMCELL Technologies Inc). Following expansion, 10⁶ cells were pelleted at 300×g for 5 minutes and resuspended in 100 μL of OptiMEM (Life Technologies). The RNA encoding gene editing proteins and an oligonucleotide repair template having the sequence:

[0720] ACCTCAAACAGACACCATGGTGCATCTGACTCCTGAGGAGAAGCTTGCCGTTACTGCCCTGTGGGGCAAGG TGAACGTGGATGAAGTTGG (SEQ ID NO: 709) were added to the resuspended cells and gently mixed with a pipette tip. The mixture was transferred to an electroporation cuvette with a 2 mm gap (89047-208, VWR). The cells were electroporated in the cuvette using a pulse generator (ECM 830, BTX) set to deliver a square-wave pulse of 200V for 5 ms. The cells were then transferred from the cuvette to a new well of a 6-well plate with 1.98 mL of StemSpan SFEM II+20 μL of StemSpan CC110 100× expansion supplement (02697, STEMCELL Technologies Inc).

[0721] ICells were transfected with 5 μg of RNA encoding each component of the gene editing protein pair and 5 μg of the oligonucleotide repair template. 48 hours after transfection, the cells' genomic DNA was purified. A segment of the HBB gene was then amplified by PCR using the primers: GCCAAGGACAGGTACGGCTGTCATC (SEQ ID NO: 627) and CTTGCCATGAGCCTTCACCTTAGGGTTG (SEQ ID NO: 628), to produce a 518 bp amplicon. Gene editing was assessed using T7 Endonuclease I (“T7E1”, New England Biolabs), which identifies and cleaves mismatches in double-stranded DNA. Briefly, the PCR product was denatured by heating approximately 200 ng of PCR product, 2 μL of NEBuffer 2 (New England Biolabs, Inc.), and nuclease-free water in a total volume of 19 μL to 95C for 5 minutes. The PCR product was then hybridized by cooling from 95C to 85C at −2C per second, then from 85C to 25C at −0.1 C per second. The hybridized PCR product was then digested with T7 Endonuclease I. Bands of approximately 299 bp and 219 bp produced by T7E1 thus indicate successful gene editing. Gene repair was assessed using digestion with HindIII-HF, which identifies and cleaves DNA comprising the recognition sequence: AAGCTT, which is not present in the above-mentioned 518 bp amplicon generated from the wild-type HBB sequence, but is present in the repair template. Bands of approximately 301 bp and 217 bp produced by HindIII-HF thus indicate successful gene repair.

[0722] FIG. 63 shows that hematopoietic cells transfected with RNA encoding gene editing proteins and a repair template had T7E1-produced bands of approximately 299 bp and 219 bp. This data demonstrates successful generation of a single-strand or double-strand break in the DNA of hematopoietic cells. FIG. 64 shows that cells transfected with RNA encoding gene editing proteins and a repair template had HindIII-HF-produced bands of approximately 301 bp and 217 bp. This data demonstrates successful generation of a repair in the DNA of hematopoietic cells, the repair corresponding to the sequence of the nucleic acid that acts as a repair template. Together, the data demonstrate HBB gene editing and HBB gene repair in hematopoietic cells.

[0723] FIG. 65 depicts the results of an experiment in which 50,000 primary human neonatal epidermal keratinocytes (animal-protein free) were transfected with 2 μg RNA encoding the PD1 TALEN pairs 1/1 (target sequences: TGCTCCAGGCATGCAGATCC (SEQ ID NO: 794) and TAGCACCGCCCAGACGACTG (SEQ ID NO: 795)) or 1/2 (target sequences: TGCTCCAGGCATGCAGATCC (SEQ ID NO: 794) and TGTAGCACCGCCCAGACGAC (SEQ ID NO: 796)) (1 μg each individual pair component) or with 2 μg RNA encoding the TRAC TALEN pairs 2/2 (target sequences: TCACCGATTTTGATTCTCAA (SEQ ID NO: 797) and TATACACATCAGAATCCTTA (SEQ ID NO: 798)) or 2/3 (target sequences: TCACCGATTTTGATTCTCAA (SEQ ID NO: 797) and TGATATACACATCAGAATCC (SEQ ID NO: 799)) (1 μg each individual pair component). Cells were harvested and DNA was extracted after 48 and analyzed for gene editing (T7E1 assay; PD1: forward primer: AGTGACCACTGCCAACAGCTTCATGTC (SEQ ID NO: 800), reverse primer: GGGTAACAGCTGAATCAGGCCCTTCG (SEQ ID NO: 801), product size: 482 nt, predicted band sizes: 223 nt, 259 nt for pair 1/1, 219 nt, 263 nt for pair 1/2; TRAC: forward primer: GAATAAGCAGTATTATTAAGTAGCCCTGCATTTCAGGTTTC (SEQ ID NO: 802), reverse primer: CGAAGGCACCAAAGCTGCCCTTAC (SEQ ID NO: 803), product size: 606 nt, predicted band sizes: 197 nt, 409 nt for pair 2/2, 195 nt, 411 nt for pair 2/3).

[0724] FIG. 66 depicts the results of an experiment in which 50,000 primary human neonatal epidermal keratinocytes (animal-protein free) were transfected with 2 μg RNA encoding the ADORA2A TALEN pairs 1/1 (target sequences: TGCTGAGCCTGCCTGTCGTC (SEQ ID NO: 804) and TGTACACCGAGGAGCCCATG (SEQ ID NO: 805)), 1/2 (target sequences: TGCTGAGCCTGCCTGTCGTC (SEQ ID NO: 804) and TGATGTACACCGAGGAGCCC (SEQ ID NO: 806)), or 2/2 (target sequences: TGAGCCTGCCTGTCGTCTGT (SEQ ID NO: 807) and TGATGTACACCGAGGAGCCC (SEQ ID NO: 806)) (1 μg each individual pair component). Cells were harvested and DNA was extracted after 48 and analyzed for gene editing (T7E1 assay; forward primer: CAGAGTCCTCTGTGAAAAAGCCCTTGGAG (SEQ ID NO: 808), reverse primer: ATGCGGATGGCAATGTAGCGGTCAATG (SEQ ID NO: 809), product size: 517 nt, predicted band sizes: 194 nt, 323 nt for pair 1/1, 196 nt, 321 nt for pair 1/2, 197 nt, 320 nt for pair 2/2).

[0725] FIG. 67 depicts the results of an experiment in which 50,000 RNA-reprogrammed human pluripotent stem cells were transfected with 2 μg RNA encoding a PD1 TALEN pair (target sequences: TGCTCCAGGCATGCAGATCC (SEQ ID NO: 794) and TGTAGCACCGCCCAGACGAC (SEQ ID NO: 796)) (1 μg each individual pair component) or with 2 μg RNA encoding a TRAC TALEN pair (target sequences: TCACCGATTTTGATTCTCAA (SEQ ID NO: 797) and TATACACATCAGAATCCTTA (SEQ ID NO: 798)) (1 μg each individual pair component). Cells were harvested and DNA was extracted after 48 and analyzed for gene editing (T7E1 assay; PD1: forward primer: AGTGACCACTGCCAACAGCTTCATGTC (SEQ ID NO: 800), reverse primer: GGGTAACAGCTGAATCAGGCCCTTCG (SEQ ID NO: 801), product size: 482 nt, predicted band sizes: 219 nt, 263 nt; TRAC: forward primer: GAATAAGCAGTATTATTAAGTAGCCCTGCATTTCAGGTTTC (SEQ ID NO: 802), reverse primer: CGAAGGCACCAAAGCTGCCCTTAC (SEQ ID NO: 803), product size: 606 nt, predicted band sizes: 197 nt, 409 nt).

### EQUIVALENTS

[0726] Those skilled in the art will recognize, or be able to ascertain, using no more than routine experimentation, numerous equivalents to the specific embodiments described specifically herein. Such equivalents are intended to be encompassed in the scope of the following claims.

### INCORPORATION BY REFERENCE

[0727] All patents and publications referenced herein are hereby incorporated by reference in their entireties.

The application's sequence listing, which the Patent Office published only in electronic form, follows.

SEQUENCE LISTING (809 sequences)

SEQ ID NO: 1 - protein, 195 aa, Homo sapiens
VLEKSDIEKFKNQLRTELTNIDHSYLKGIDIASKKKTSNVENTEFEAISTKIFTDELGFSGKHLGGSNKPDGLLWDDDCAIILDSKAYSEGFPLTASHTDAMGRYLRQFTERKEEIKPTWWDIAPEHLDNTYFAYVSGSFSGNYKEQLQKFRQDTNHLGGALEFVKLLLLANNYKTQKMSKKEVKKSILDYNISY

SEQ ID NO: 2 - protein, 195 aa, Homo sapiens
VLEKSDIEKFKNQLRTELTNIDHSYLKGIDIASKKKTSNVENTEFEAISTKIFTDELGFSGEHLGGSNKPDGLLWDDDCAIILDSKAYSEGFPLTASHTDAMGRYLRQFTERKEEIKPTWWDIAPEHLDNTYFAYVSGSFSGNYKEQLQKFRQDTNHLGGALEFVKLLLLANNYKTQKMSKKEVKKSILDYNISY

SEQ ID NO: 3 - protein, 195 aa, Homo sapiens
VLEKSDIEKFKNQLRTELTNIDHSYLKGIDIASKPKTSNVENTEFEAISTKIFTDELGFSGKHLGGSNKPDGLLWDDDCAIILDSKAYSEGFPLTASHTDAMGRYLRQFTERKEEIKPTWWDIAPEHLDNTYFAYVSGSFSGNYKEQLQKFRQDTNHLGGALEFVKLLLLANNYKTQKMSKKEVKKSILDYNISY

SEQ ID NO: 4 - protein, 195 aa, Homo sapiens
VLEKSDIEKFKNQLRTELTNIDHSYLKGIDIASKPKTSNVENTEFEAISTKIFTDELGFSGEHLGGSNKPDGLLWDDDCAIILDSKAYSEGFPLTASHTDAMGRYLRQFTERKEEIKPTWWDIAPEHLDNTYFAYVSGSFSGNYKEQLQKFRQDTNHLGGALEFVKLLLLANNYKTQKMSKKEVKKSILDYNISY

SEQ ID NO: 5 - protein, 191 aa, Homo sapiens
VLEKSDIEKFKNQLRTELTNIDHSYLKGIDIASKPVENTEFEAISTKIFTDELGFSGEHLGGSNKPDGLLWDDDCAIILDSKAYSEGFPLTASHTDAMGRYLRQFTERKEEIKPTWWDIAPEHLDNTYFAYVSGSFSGNYKEQLQKFRQDTNHLGGALEFVKLLLLANNYKTQKMSKKEVKKSILDYNISY

SEQ ID NO: 6 - protein, 195 aa, Homo sapiens
VLEKSDIEKFKNQLRTELTNIDHSYLKGIDIASKKKTSNVENTEFEAISTKIFTDELGFSGKHLGGSNKPDGLLWDDDCAIILDSKAYSEGFPLTASHTDAMGRYLRQFTERKEEIKPTWWDIAPEHLDNTYFAYVSGSFSGDYKEQLQKFRQDTNHLGGALEFVKLLLLANNYKTQKMSKKEVKKSILDYNISY

SEQ ID NO: 7 - protein, 195 aa, Homo sapiens
VLEKSDIEKFKNQLRTELTNIDHSYLKGIDIASKKKTSNVENTEFEAISTKIFTDELGFSGKHLGGSNKPDGLLWDDDCAIILDSKAYSEGFPLTASHTDAMGRYLRQFTERKEEIKPTWWDIAPEHLDNTYFAYVSGSFSGDYKEQLQKFRQNTNHLGGALEFVKLLLLANNYKTQKMSKKEVKKSILDYNISY

SEQ ID NO: 8 - protein, 360 aa, Homo sapiens
MAGHLASDFAFSPPPGGGGDGPGGPEPGWVDPRTWLSFQGPPGGPGIGPGVGPGSEVWGIPPCPPPYEFCGGMAYCGPQVGVGLVPQGGLETSQPEGEAGVGVESNSDGASPEPCTVTPGAVKLEKEKLEQNPEESQDIKALQKELEQFAKLLKQKRITLGYTQADVGLTLGVLFGKVFSQTTICRFEALQLSFKNMCKLRPLLQKWVEEADNNENLQEICKAETLVQARKRKRTSIENRVRGNLENLFLQCPKPTLQQISHIAQQLGLEKDVVRVWFCNRRQKGKRSSSDYAQREDFEAAGSPFSGGPVSFPLAPGPHFGTPGYGSPHFTALYSSVPFPEGEAFPPVSVTTLGSPMHSN

SEQ ID NO: 9 - protein, 317 aa, Homo sapiens
MYNMMETELKPPGPQQTSGGGGGNSTAAAAGGNQKNSPDRVKRPMNAFMVWSRGQRRKMAQENPKMHNSEISKRLGAEWKLLSETEKRPFIDEAKRLRALHMKEHPDYKYRPRRKTKTLMKKDKYTLPGGLLAPGGNSMASGVGVGAGLGAGVNQRMDSYAHMNGWSNGSYSMMQDQLGYPQHPGLNAHGAAQMQPMHRYDVSALQYNSMTSSQTYMNGSPTYSMSYSQQGTPGMALGSMGSVVKSEASSSPPVVTSSSHSRAPCQAGDLRDMISMYLPGAEVPEPAAPSRLHMSQHYQSGPVPGTAINGTLPLSHM

SEQ ID NO: 10 - protein, 479 aa, Homo sapiens
MRQPPGESDMAVSDALLPSFSTFASGPAGREKTLRQAGAPNNRWREELSHMKRLPPVLPGRPYDLAAATVATDLESGGAGAACGGSNLAPLPRRETEEFNDLLDLDFILSNSLTHPPESVAATVSSSASASSSSSPSSSGPASAPSTCSFTYPIRAGNDPGVAPGGTGGGLLYGRESAPPPTAPFNLADINDVSPSGGFVAELLRPELDPVYIPPQQPQPPGGGLMGKFVLKASLSAPGSEYGSPSVISVSKGSPDGSHPVVVAPYNGGPPRTCPKIKQEAVSSCTHLGAGPPLSNGHRPAAHDFPLGRQLPSRTTPTLGLEEVLSSRDCHPALPLPPGFHPHPGPNYPSFLPDQMQPQVPPLHYQELMPPGSCMPEEPKPKRGRRSWPRKRTATHTCDYAGCGKTYTKSSHLKAHLRTHTGEKPYHCDWDGCGWKFARSDELTRHYRKHTGHRPFQCQKCDRAFSRSDHLALHMKRHF

SEQ ID NO: 11 - protein, 454 aa, Homo sapiens
MDFFRVVENQQPPATMPLNVSFTNRNYDLDYDSVQPYFYCDEEENFYQQQQQSELQPPAPSEDIWKKFELLPTPPLSPSRRSGLCSPSYVAVTPFSLRGDNDGGGGSFSTADQLEMVTELLGGDMVNQSFICDPDDETFIKNIIIQDCMWSGFSAAAKLVSEKLASYQAARKDSGSPNPARGHSVCSTSSLYLQDLSAAASECIDPSVVFPYPLNDSSSPKSCASQDSSAFSPSSDSLLSSTESSPQGSPEPLVLHEETPPTTSSDSEEEQEDEEEIDVVSVEKRQAPGKRSESGSPSAGGHSKPPHSPLVLKRCHVSTHQHNYAAPPSTRKDYPAAKRVKLDSVRVLRQISNNRKCTSPRSSDTEENVKRRTHNVLERQRRNELKRSFFALRDQIPELENNEKAPKVVILKKATAYILSVQAEEQKLISEEDLLRKRREQLKHKLEQLRNSCA

SEQ ID NO: 12 - DNA, 191 bp, Homo sapiens
ttgaatcgcgggacccgttggcagaggtggcggcggcggcatgggtgccccgacgttgccccctgcctggcagccctttctcaaggaccaccgcatctctacattcaagaactggcccttcttggagggctgcgcctgcaccccggagcgggtgagactgcccggcctcctggggtcccccacgcccgcct

SEQ ID NO: 13 - DNA, 190 bp, Homo sapiens
ggctgccacgtccactcacgagctgtgctgtcccttgcagatggccgaggctggcttcatccactgccccactgagaacgagccagacttggcccagtgtttcttctgcttcaaggagctggaaggctgggagccagatgacgaccccatgtaagtcttctctggccagcctcgatgggctttgttttga

SEQ ID NO: 14 - DNA, 198 bp, Homo sapiens
cccttcagctgcctttccgctgttgttttgatttttctagagaggaacataaaaagcattcgtccggttgcgctttcctttctgtcaagaagcagtttgaagaattaacccttggtgaatttttgaaactggacagagaaagagccaagaacaaaattgtatgtattgggaataagaactgctcaaaccctgttcaat

SEQ ID NO: 15 - DNA, 170 bp, Homo sapiens
gctctggtttcagtgtcatgtgtctattctttatttccaggcaaaggaaaccaacaataagaagaaagaatttgaggaaactgcggagaaagtgcgccgtgccatcgagcagctggctgccatggattgaggcctctggccggagctgcctggtcccagagtggctgcac

SEQ ID NO: 16 - DNA, 20 bp, Homo sapiens
ttgccccctgcctggcagcc

SEQ ID NO: 17 - DNA, 20 bp, Homo sapiens
ttcttgaatgtagagatgcg

SEQ ID NO: 18 - DNA, 20 bp, Homo sapiens
tgggtgccccgacgttgccc

SEQ ID NO: 19 - DNA, 20 bp, Homo sapiens
tgcggtggtccttgagaaag

SEQ ID NO: 20 - DNA, 20 bp, Homo sapiens
tcaaggaccaccgcatctct

SEQ ID NO: 21 - DNA, 20 bp, Homo sapiens
tgcaggcgcagccctccaag

SEQ ID NO: 22 - DNA, 20 bp, Homo sapiens
tggccgaggctggcttcatc

SEQ ID NO: 23 - DNA, 20 bp, Homo sapiens
tgggccaagtctggctcgtt

SEQ ID NO: 24 - DNA, 20 bp, Homo sapiens
ttggcccagtgtttcttctg

SEQ ID NO: 25 - DNA, 20 bp, Homo sapiens
tcgtcatctggctcccagcc

SEQ ID NO: 26 - DNA, 20 bp, Homo sapiens
tgcgctttcctttctgtcaa

SEQ ID NO: 27 - DNA, 20 bp, Homo sapiens
tcaaaaattcaccaagggtt

SEQ ID NO: 28 - protein, 297 aa, Homo sapiens
MEDYTKIEKIGEGTYGVVYKGRHKTTGQVVAMKKIRLESEEEGVPSTAIREISLLKELRHPNIVSLQDVLMQDSRLYLIFEFLSMDLKKYLDSIPPGQYMDSSLVKSYLYQILQGIVFCHSRRVLHRDLKPQNLLIDDKGTIKLADFGLARAFGIPIRVYTHEVVTLWYRSPEVLLGSARYSTPVDIWSIGTIFAELATKKPLFHGDSEIDQLFRIFRALGTPNNEVWPEVESLQDYKNTFPKWKPGSLASHVKNLDENGLDLLSKMLIYDPAKRISGKMALNHPYFNDLDNQIKKM

SEQ ID NO: 29 - protein, 298 aa, Homo sapiens
MENFQKVEKIGEGTYGVVYKARNKLTGEVVALKKIRLDTETEGVPSTAIREISLLKELNHPNIVKLLDVIHTENKLYLVFEFLHQDLKKFMDASALTGIPLPLIKSYLFQLLQGLAFCHSHRVLHRDLKPQNLLINTEGAIKLADFGLARAFGVPVRTYTHEVVTLWYRAPEILLGCKYYSTAVDIWSLGCIFAEMVTRRALFPGDSEIDQLFRIFRTLGTPDEVVWPGVTSMPDYKPSFPKWARQDFSKVVPPLDEDGRSLLSQMLHYDPNKRISAKAALAHPFFQDVTKPVPHLRL

SEQ ID NO: 30 - protein, 305 aa, Homo sapiens
MDMFQKVEKIGEGTYGVVYKAKNRETGQLVALKKIRLDLEMEGVPSTAIREISLLKELKHPNIVRLLDVVHNERKLYLVFEFLSQDLKKYMDSTPGSELPLHLIKSYLFQLLQGVSFCHSHRVIHRDLKPQNLLINELGAIKLADFGLARAFGVPLRTYTHEVVTLWYRAPEILLGSKFYTTAVDIWSIGCIFAEMVTRKALFPGDSEIDQLFRIFRMLGTPSEDTWPGVTQLPDYKGSFPKWTRKGLEEIVPNLEPEGRDLLMQLLQYDPSQRITAKTALAHPYFSSPEPSPAARQYVLQRFRH

SEQ ID NO: 31 - protein, 303 aa, Homo sapiens
MATSRYEPVAEIGVGAYGTVYKARDPHSGHFVALKSVRVPNGGGGGGGLPISTVREVALLRRLEAFEHPNVVRLMDVCATSRTDREIKVTLVFEHVDQDLRTYLDKAPPPGLPAETIKDLMRQFLRGLDFLHANCIVHRDLKPENILVTSGGTVKLADFGLARIYSYQMALTPVVVTLWYRAPEVLLQSTYATPVDMWSVGCIFAEMFRRKPLFCGNSEADQLGKIFDLIGLPPEDDWPRDVSLPRGAFPPRGPRPVQSVVPEMEESGAQLLLEMLTFNPHKRISAFRALQHSYLHKDEGNPE

SEQ ID NO: 32 - protein, 292 aa, Homo sapiens
MQKYEKLEKIGEGTYGTVFKAKNRETHEIVALKRVRLDDDDEGVPSSALREICLLKELKHKNIVRLHDVLHSDKKLTLVFEFCDQDLKKYFDSCNGDLDPEIVKSFLFQLLKGLGFCHSRNVLHRDLKPQNLLINRNGELKLADFGLARAFGIPVRCYSAEVVTLWYRPPDVLFGAKLYSTSIDMWSAGCIFAELANAGRPLFPGNDVDDQLKRIFRLLGTPTEEQWPSMTKLPDYKPYPMYPATTSLVNVVPKLNATGRDLLQNLLKCNPVQRISAEEALQHPYFSDFCPP

SEQ ID NO: 33 - protein, 326 aa, Homo sapiens
MEKDGLCRADQQYECVAEIGEGAYGKVFKARDLKNGGRFVALKRVRVQTGEEGMPLSTIREVAVLRHLETFEHPNVVRLFDVCTVSRTDRETKLTLVFEHVDQDLTTYLDKVPEPGVPTETIKDMMFQLLRGLDFLHSHRVVHRDLKPQNILVTSSGQIKLADFGLARIYSFQMALTSVVVTLWYRAPEVLLQSSYATPVDLWSVGCIFAEMFRRKPLFRGSSDVDQLGKILDVIGLPGEEDWPRDVALPRQAFHSKSAQPIEKFVTDIDELGKDLLLKCLTFNPAKRISAYSALSHPYFQDLERCKENLDSHLPPSQNTSELNTA

SEQ ID NO: 34 - protein, 142 aa, Homo sapiens
MGAPTLPPAWQPFLKDHRISTFKNWPFLEGCACTPERMAEAGFIHCPTENEPDLAQCFFCFKELEGWEPDDDPIEEHKKHSSGCAFLSVKKQFEELTLGEFLKLDRERAKNKIAKETNNKKKEFEETAEKVRRAIEQLAAMD

SEQ ID NO: 35 - protein, 826 aa, Homo sapiens
MEGAGGANDKKKISSERRKEKSRDAARSRRSKESEVFYELAHQLPLPHNVSSHLDKASVMRLTISYLRVRKLLDAGDLDIEDDMKAQMNCFYLKALDGFVMVLTDDGDMIYISDNVNKYMGLTQFELTGHSVFDFTHPCDHEEMREMLTHRNGLVKKGKEQNTQRSFFLRMKCTLTSRGRTMNIKSATWKVLHCTGHIHVYDTNSNQPQCGYKKPPMTCLVLICEPIPHPSNIEIPLDSKTFLSRHSLDMKFSYCDERITELMGYEPEELLGRSIYEYYHALDSDHLTKTHHDMFTKGQVTTGQYRMLAKRGGYVWVETQATVIYNTKNSQPQCIVCVNYVVSGIIQHDLIFSLQQTECVLKPVESSDMKMTQLFTKVESEDTSSLFDKLKKEPDALTLLAPAAGDTIISLDFGSNDTETDDQQLEEVPLYNDVMLPSPNEKLQNINLAMSPLPTAETPKPLRSSADPALNQEVALKLEPNPESLELSFTMPQIQDQTPSPSDGSTRQSSPEPNSPSEYCFYVDSDMVNEFKLELVEKLFAEDTEAKNPFSTQDTDLDLEMLAPYIPMDDDFQLRSFDQLSPLESSSASPESASPQSTVTVFQQTQIQEPTANATTTTATTDELKTVTKDRMEDIKILIASPSPTHIHKETTSATSSPYRDTQSRTASPNRAGKGVIEQTEKSHPRSPNVLSVALSQRTTVPEEELNPKILALQNAQRKRKMEHDGSLFQAVGIGTLLQQPDDHAATTSLSWKRVKGCKSSEQNGMEQKTIILIPSDLACRLLGQSMDESGLPQLTSYDCEVNAPIQGSRNLLQGEELLRALDQVN

SEQ ID NO: 36 - protein, 449 aa, Homo sapiens
MGRVGGMAQPMGRAGAPKPMGRAGSARRGRFKGCWSEGSPVHPVPAVLSWLLALLRCASTMLSLRVPLAPITDPQQLQLSPLKGLSLVDKENTPPALSGTRVLASKTARRIFQEPTEPKTKAAAPGVEDEPLLRENPRRFVIFPIEYHDIWQMYKKAEASFWTAEEVDLSKDIQHWESLKPEERYFISHVLAFFAASDGIVNENLVERFSQEVQITEARCFYGFQIAMENIHSEMYSLLIDTYIKDPKEREFLFNAIETMPCVKKKADWALRWIGDKEATYGERVVAFAAVEGIFFSGSFASIFWLKKRGLMPGLTFSNELISRDEGLHCDFACLMFKHLVHKPSEERVREIIINAVRIEQEFLTEALPVKLIGMNCTLMKQYIEFVADRLMLELGFSKVFRVENPFDFMENISLEGKTNFFEKRVGEYQRMGVMSSPTENSFTLDADF

SEQ ID NO: 37 - protein, 188 aa, Homo sapiens [sequence omitted]

SEQ ID NO: 38 - protein, 1210 aa, Homo sapiens [sequence omitted]

SEQ ID NO: 39 - protein, 454 aa, Homo sapiens; identical to SEQ ID NO: 11

SEQ ID NO: 40 - protein, 889 aa, Homo sapiens
MEEGAPRQPGPSQWPPEDEKEVIRRAIQKELKIKEGVENLRRVATDRRHLGHVQQLLRSSNRRLEQLHGELRELHARILLPGPGPGPAEPVASGPRPWAEQLRARHLEALRRQLHVELKVKQGAENMTHTCASGTPKERKLLAAAQQMLRDSQLKVALLRMKISSLEASGSPEPGPELLAEELQHRLHVEAAVAEGAKNVVKLLSSRRTQDRKALAEAQAQLQESSQKLDLLRLALEQLLEQLPPAHPLRSRVTRELRAAVPGYPQPSGTPVKPTALTGTLQVRLLGCEQLLTAVPGRSPAAALASSPSEGWLRTKAKHQRGRGELASEVLAVLKVDNRVVGQTGWGQVAEQSWDQTFVIPLERARELEIGVHWRDWRQLCGVAFLRLEDFLDNACHQLSLSLVPQGLLFAQVTFCDPVIERRPRLQRQERIFSKRRGQDFLRASQMNLGMAAWGRLVMNLLPPCSSPSTISPPKGCPRTPTTLREASDPATPSNFLPKKTPLGEEMTPPPKPPRLYLPQEPTSEETPRTKRPHMEPRTRRGPSPPASPTRKPPRLQDFRCLAVLGRGHFGKVLLVQFKGTGKYYAIKALKKQEVLSRDEIESLYCEKRILEAVGCTGHPFLLSLLACFQTSSHACFVTEFVPGGDLMMQIHEDVFPEPQARFYVACVVLGLQFLHEKKIIYRDLKLDNLLLDAQGFLKIADFGLCKEGIGFGDRTSTFCGTPEFLAPEVLTQEAYTRAVDWWGLGVLLYEMLVGECPFPGDTEEEVFDCIVNMDAPYPGFLSVQGLEFIQKLLQKCPEKRLGAGEQDAEEIKVQPFFRTTNWQALLARTIQPPFVPTLCGPADLRYFEGEFTGLPPALTPPAPHSLLTARQQAAFRDFDFVSERFLEP

SEQ ID NO: 41 - protein, 1056 aa, Homo sapiens
MASQPNSSAKKKEEKGKNIQVVVRCRPFNLAERKASAHSIVECDPVRKEVSVRTGGLADKSSRKTYTFDMVFGASTKQIDVYRSVVCPILDEVIMGYNCTIFAYGQTGTGKTFTMEGERSPNEEYTWEEDPLAGIIPRTLHQIFEKLTDNGTEFSVKVSLLEIYNEELFDLLNPSSDVSERLQMFDDPRNKRGVIIKGLEEITVHNKDEVYQILEKGAAKRTTAATLMNAYSSRSHSVFSVTIHMKETTIDGEELVKIGKLNLVDLAGSENIGRSGAVDKRAREAGNINQSLLTLGRVITALVERTPHVPYRESKLTRILQDSLGGRTRTSIIATISPASLNLEETLSTLEYAHRAKNILNKPEVNQKLTKKALIKEYTEEIERLKRDLAAAREKNGVYISEENFRVMSGKLTVQEEQIVELIEKIGAVEEELNRVTELFMDNKNELDQCKSDLQNKTQELETTQKHLQETKLQLVKEEYITSALESTEEKLHDAASKLLNTVEETTKDVSGLHSKLDRKKAVDQHNAEAQDIFGKNLNSLFNNMEELIKDGSSKQKAMLEVHKTLFGNLLSSSVSALDTITTVALGSLTSIPENVSTHVSQIFNMILKEQSLAAESKTVLQELINVLKTDLLSSLEMILSPTVVSILKINSQLKHIFKTSLTVADKIEDQKKELDGFLSILCNNLHELQENTICSLVESQKQCGNLTEDLKTIKQTHSQELCKLMNLWTERFCALEEKCENIQKPLSSVQENIQQKSKDIVNKMTFHSQKFCADSDGFSQELRNFNQEGTKLVEESVKHSDKLNGNLEKISQETEQRCESLNTRTVYFSEQWVSSLNEREQELHNLLEVVSQCCEASSSDITEKSDGRKAAHEKQHNIFLDQMTIDEDKLIAQNLELNETIKIGLTKLNCFLEQDLKLDIPTGTTPQRKSYLYPSTLVRTEPREHLLDQLKRKQPELLMMLNCSENNKEETIPDVDVEEAVLGQYTEEPLSQEPSVDAGVDCSSIGGVPFFQHKKSHGKDKENRGINTLERSKVEETTEHLVTKSRLPLRAQINL

SEQ ID NO: 42 - protein, 2825 aa, Homo sapiens
MYASLGSGPVAPLPASVPPSVLGSWSTGGSRSCVRQETKSPGGARTSGHWASVWQEVLKQLQGSIEDEAMASSGQIDLLERLKELNLDSSNFPGVKLRSKMSLRSYGSREGSVSSRSGECSPVPMGSFPRRGFVNGSRESTGYLEELEKERSLLLADLDKEEKEKDWYYAQLQNLTKRIDSLPLTENFSLQTDMTRRQLEYEARQIRVAMEEQLGTCQDMEKRAQRSSQNKHETGSHDAERQNEGQGVGEINMATSGNGQGSTTRMDHETASVLSSSSTHSAPRRLTSHLGTKVEMVYSLLSMLGTHDKDDMSRTLLAMSSSQDSCISMRQSGCLPLLIQLLHGNDKDSVLLGNSRGSKEARARASAALHNIIHSQPDDKRGRREIRVLHLLEQIRAYCETCWEWQEAHEPGMDQDKNPMPAPVEHQICPAVCVLMKLSFDEEHRHAMNELGGLQAIAELLQVDCEMYGLTNDHYSITLRRYAGMALTNLTFGDVANKATLCSMKGCMRALVAQLKSESEDLQQVIASVLRNLSWRADVNSKKTLREVGSVKALMECALEVKKESTLKSVLSALWNLSAHCTENKADICAVDGALAFLVGTLTYRSQTNTLAIIESGGGILRNVSSLIATNEDHRQILRENNCLQTLLQHLKSHSLTIVSNACGTLWNLSARNPKDQEALWDMGAVSMLKNLIHSKHKMIAMGSAAALRNLMANRPAKYKDANIMSPGSSLPSLHVRKQKALEAELDAQHLSETFDNIDNLSPKASHRSKQRHKQSLYGDYVFDTNRHDDNRSDNFNTGNMTVLSPYLNTTVLPSSSSSRGSLDSSRSEKDRSLERERGIGLGNYHPATENPGTSSKRGLQISTTAAQIAKVMEEVSAIHTSQEDRSSGSTTELHCVTDERNALRRSSAAHTHSNTYNFTKSENSNRTCSMPYAKLEYKRSSNDSLNSVSSSDGYGKRGQMKPSIESYSEDDESKFCSYGQYPADLAHKIHSANHMDDNDGELDTPINYSLKYSDEQLNSGRQSPSQNERWARPKHIIEDEIKQSEQRQSRNQSTTYPVYTESTDDKHLKFQPHFGQQECVSPYRSRGANGSETNRVGSNHGINQNVSQSLCQEDDYEDDKPTNYSERYSEEEQHEEEERPTNYSIKYNEEKRHVDQPIDYSLKYATDIPSSQKQSFSFSKSSSGQSSKTEHMSSSSENTSTPSSNAKRQNQLHPSSAQSRSGQPQKAATCKVSSINQETIQTYCVEDTPICFSRCSSLSSLSSAEDEIGCNQTTQEADSANTLQIAEIKEKIGTRSAEDPVSEVPAVSQHPRTKSSRLQGSSLSSESARHKAVEFSSGAKSPSKSGAQTPKSPPEHYVQETPLMFSRCTSVSSLDSFESRSIASSVQSEPCSGMVSGIISPSDLPDSPGQTMPPSRSKTPPPPPQTAQTKREVPKNKAPTAEKRESGPKQAAVNAAVQRVQVLPDADTLLHFATESTPDGFSCSSSLSALSLDEPFIQKDVELRIMPPVQENDNGNETESEQPKESNENQEKEAEKTIDSEKDLLDDSDDDDIEILEECIISAMPTKSSRKAKKPAQTASKLPPPVARKPSQLPVYKLLPSQNRLQPQKHVSFTPGDDMPRVYCVEGTPINFSTATSLSDLTIESPPNELAAGEGVRGGAQSGEFEKRDTIPTEGRSTDEAQGGKTSSVTIPELDDNKAEEGDILAECINSAMPKGKSHKPFRVKKIMDQVQQASASSSAPNKNQLDGKKKKPTSPVKPIPQNTEYRTRVRKNADSKNNLNAERVFSDNKDSKKQNLKNNSKVFNDKLPNNEDRVRGSFAFDSPHHYTPIEGTPYCFSRNDSLSSLDFDDDDVDLSREKAELRKAKENKESEAKVTSHTELTSNQQSANKTQAIAKQPINRGQPKPILQKQSTFPQSSKDIPDRGAATDEKLQNFAIENTPVCFSHNSSLSSLSDIDQENNNKENEPIKETEPPDSQGEPSKPQASGYAPKSFHVEDTPVCFSRNSSLSSLSIDSEDDLLQECISSAMPKKKKPSRLKGDNEKHSPRNMGGILGEDLTLDLKDIQRPDSEHGLSPDSENFDWKAIQEGANSIVSSLHQAAAAACLSRQASSDSDSILSLKSGISLGSPFHLTPDQEEKPFTSNKGPRILKPGEKSTLETKKIESESKGIKGGKKVYKSLITGKVRSNSEISGQMKQPLQANMPSISRGRTMIHIPGVRNSSSSTSPVSKKGPPLKTPASKSPSEGQTATTSPRGAKPSVKSELSPVARQTSQIGGSSKAPSRSGSRDSTPSRPAQQPLSRPIQSPGRNSISPGRNGISPPNKLSQLPRTSSPSTASTKSSGSGKMSYTSPGRQMSQQNLTKQTGLSKNASSIPRSESASKGLNQMNNGNGANKKVELSRMSSTKSSGSESDRSERPVLVRQSTFIKEAPSPTLRRKLEESASFESLSPSSRPASPTRSQAQTPVLSPSLPDMSLSTHSSVQAGGWRKLPPNLSPTIEYNDGRPAKRHDIARSHSESPSRLPINRSGTWKREHSKHSSSLPRVSTWRRTGSSSSILSASSESSEKAKSEDEKHVNSISGTKQSKENQVSAKGTWRKIKENEFSPTNSTSQTVSSGATNGAESKTLIYQMAPAVSKTEDVWVRIEDCPINNPRSGRSPTGNTPPVIDSVSEKANPNIKDSKDNQAKQNVGNGSVPMRTVGLENRLNSFIQVDAPDQKGTEIKPGQNNPVPVSETNESSIVERTPFSSSSSSKHSSPSGTVAARVTPFNYNPSPRKSSADSTSARPSQIPTPVNNNTKKRDSKTDSTESSGTQSPKRHSGSYLVTSV

SEQ ID NO: 43 - protein, 1863 aa, Homo sapiens
MDLSALRVEEVQNVINAMQKILECPICLELIKEPVSTKCDHIFCKFCMLKLLNQKKGPSQCPLCKNDITKRSLQESTRFSQLVEELLKIICAFQLDTGLEYANSYNFAKKENNSPEHLKDEVSIIQSMGYRNRAKRLLQSEPENPSLQETSLSVQLSNLGTVRTLRTKQRIQPQKTSVYIELGSDSSEDTVNKATYCSVGDQELLQITPQGTRDEISLDSAKKAACEFSETDVTNTEHHQPSNNDLNTTEKRAAERHPEKYQGSSVSNLHVEPCGTNTHASSLQHENSSLLLTKDRMNVEKAEFCNKSKQPGLARSQHNRWAGSKETCNDRRTPSTEKKVDLNADPLCERKEWNKQKLPCSENPRDTEDVPWITLNSSIQKVNEWFSRSDELLGSDDSHDGESESNAKVADVLDVLNEVDEYSGSSEKIDLLASDPHEALICKSERVHSKSVESNIEDKIFGKTYRKKASLPNLSHVTENLIIGAFVTEPQIIQERPLTNKLKRKRRPTSGLHPEDFIKKADLAVQKTPEMINQGTNQTEQNGQVMNITNSGHENKTKGDSIQNEKNPNPIESLEKESAFKTKAEPISSSISNMELELNIHNSKAPKKNRLRRKSSTRHIHALELVVSRNLSPPNCTELQIDSCSSSEEIKKKKYNQMPVRHSRNLQLMEGKEPATGAKKSNKPNEQTSKRHDSDTFPELKLTNAPGSFTKCSNTSELKEFVNPSLPREEKEEKLETVKVSNNAEDPKDLMLSGERVLQTERSVESSSISLVPGTDYGTQESISLLEVSTLGKAKTEPNKCVSQCAAFENPKGLIHGCSKDNRNDTEGFKYPLGHEVNHSRETSIEMEESELDAQYLQNTFKVSKRQSFAPFSNPGNAEEECATFSAHSGSLKKQSPKVTFECEQKEENQGKNESNIKPVQTVNITAGFPVVGQKDKPVDNAKCSIKGGSRFCLSSQFRGNETGLITPNKHGLLQNPYRIPPLFPIKSFVKTKCKKNLLEENFEEHSMSPEREMGNENIPSTVSTISRNNIRENVFKEASSSNINEVGSSTNEVGSSINEIGSSDENIQAELGRNRGPKLNAMLRLGVLQPEVYKQSLPGSNCKHPEIKKQEYEEVVQTVNTDFSPYLISDNLEQPMGSSHASQVCSETPDDLLDDGEIKEDTSFAENDIKESSAVFSKSVQKGELSRSPSPFTHTHLAQGYRRGAKKLESSEENLSSEDEELPCFQHLLFGKVNNIPSQSTRHSTVATECLSKNTEENLLSLKNSLNDCSNQVILAKASQEHHLSEETKCSASLFSSQCSELEDLTANTNTQDPFLIGSSKQMRHQSESQGVGLSDKELVSDDEERGTGLEENNQEEQSMDSNLGEAASGCESETSVSEDCSGLSSQSDILTTQQRDTMQHNLIKLQQEMAELEAVLEQHGSQPSNSYPSIISDSSALEDLRNPEQSTSEKAVLTSQKSSEYPISQNPEGLSADKFEVSADSSTSKNKEPGVERSSPSKCPSLDDRWYMHSCSGSLQNRNYPSQEELIKVVDVEEQQLEESGPHDLTETSYLPRQDLEGTPYLESGISLFSDDPESDPSEDRAPESARVGNIPSSTSALKVPQLKVAESAQSPAAAHTTDTAGYNAMEESVSREKPELTASTERVNKRMSMVVSGLTPEEFMLVYKFARKHHITLTNLITEETTHVVMKTDAEFVCERTLKYFLGIAGGKWVVSYFWVTQSIKERKMLNEHDFEVRGDVVNGRNHQGPKRARESQDRKIFRGLEICCYGPFTNMPTDQLEWMVQLCGASVVKELSSFTLGTGVHPIVVVQPDAWTEDNGFHAIGQMCEAPVVTREWVLDSVALYQCQELDTYLIPQIPHSHY

SEQ ID NO: 44 - protein, 3418 aa, Homo sapiens
MPIGSKERPTFFEIFKTRCNKADLGPISLNWFEELSSEAPPYNSEPAEESEHKNNNYEPNLFKTPQRKPSYNQLASTPIIFKEQGLTLPLYQSPVKELDKFKLDLGRNVPNSRHKSLRTVKTKMDQADDVSCPLLNSCLSESPVVLQCTHVTPQRDKSVVCGSLFHTPKFVKGRQTPKHISESLGAEVDPDMSWSSSLATPPTLSSTVLIVRNEEASETVFPHDTTANVKSYFSNHDESLKKNDRFIASVTDSENTNQREAASHGFGKTSGNSFKVNSCKDHIGKSMPNVLEDEVYETVVDTSEEDSFSLCFSKCRTKNLQKVRTSKTRKKIFHEANADECEKSKNQVKEKYSFVSEVEPNDTDPLDSNVANQKPFESGSDKISKEVVPSLACEWSQLTLSGLNGAQMEKIPLLHISSCDQNISEKDLLDTENKRKKDFLTSENSLPRISSLPKSEKPLNEETVVNKRDEEQHLESHTDCILAVKQAISGTSPVASSFQGIKKSIFRIRESPKETFNASFSGHMTDPNFKKETEASESGLEIHTVCSQKEDSLCPNLIDNGSWPATTTQNSVALKNAGLISTLKKKTNKFIYAIHDETSYKGKKIPKDQKSELINCSAQFEANAFEAPLTFANADSGLLHSSVKRSCSQNDSEEPTLSLTSSFGTILRKCSRNETCSNNTVISQDLDYKEAKCNKEKLQLFITPEADSLSCLQEGQCENDPKSKKVSDIKEEVLAAACHPVQHSKVEYSDTDFQSQKSLLYDHENASTLILTPTSKDVLSNLVMISRGKESYKMSDKLKGNNYESDVELTKNIPMEKNQDVCALNENYKNVELLPPEKYMRVASPSRKVQFNQNTNLRVIQKNQEETTSISKITVNPDSEELFSDNENNFVFQVANERNNLALGNTKELHETDLTCVNEPIFKNSTMVLYGDTGDKQATQVSIKKDLVYVLAEENKNSVKQHIKMTLGQDLKSDISLNIDKIPEKNNDYMNKWAGLLGPISNHSFGGSFRTASNKEIKLSEHNIKKSKMFFKDIEEQYPTSLACVEIVNTLALDNQKKLSKPQSINTVSAHLQSSVVVSDCKNSHITPQMLFSKQDFNSNHNLTPSQKAEITELSTILEESGSQFEFTQFRKPSYILQKSTFEVPENQMTILKTTSEECRDADLHVIMNAPSIGQVDSSKQFEGTVEIKRKFAGLLKNDCNKSASGYLTDENEVGFRGFYSAHGTKLNVSTEALQKAVKLFSDIENISEETSAEVHPISLSSSKCHDSVVSMFKIENHNDKTVSEKNNKCQLILQNNIEMTTGTFVEEITENYKRNTENEDNKYTAASRNSHNLEFDGSDSSKNDTVCIHKDETDLLFTDQHNICLKLSGQFMKEGNTQIKEDLSDLTFLEVAKAQEACHGNTSNKEQLTATKTEQNIKDFETSDTFFQTASGKNISVAKESFNKIVNFFDQKPEELHNFSLNSELHSDIRKNKMDILSYEETDIVKHKILKESVPVGTGNQLVTFQGQPERDEKIKEPTLLGFHTASGKKVKIAKESLDKVKNLFDEKEQGTSEITSFSHQWAKTLKYREACKDLELACETIEITAAPKCKEMQNSLNNDKNLVSIETVVPPKLLSDNLCRQTENLKTSKSIFLKVKVHENVEKETAKSPATCYTNQSPYSVIENSALAFYTSCSRKTSVSQTSLLEAKKWLREGIFDGQPERINTADYVGNYLYENNSNSTIAENDKNHLSEKQDTYLSNSSMSNSYSYHSDEVYNDSGYLSKNKLDSGIEPVLKNVEDQKNTSFSKVISNVKDANAYPQTVNEDICVEELVTSSSPCKNKNAAIKLSISNSNNFEVGPPAFRIASGKIVCVSHETIKKVKDIFTDSFSKVIKENNENKSKICQTKIMAGCYEALDDSEDILHNSLDNDECSTHSHKVFADIQSEEILQHNQNMSGLEKVSKISPCDVSLETSDICKCSIGKLHKSVSSANTCGIFSTASGKSVQVSDASLQNARQVFSEIEDSTKQVFSKVLFKSNEHSDQLTREENTAIRTPEHLISQKGFSYNVVNSSAFSGFSTASGKQVSILESSLHKVKGVLEEFDLIRTEHSLHYSPTSRQNVSKILPRVDKRNPEHCVNSEMEKTCSKEFKLSNNLNVEGGSSENNHSIKVSPYLSQFQQDKQQLVLGTKVSLVENIHVLGKEQASPKNVKMEIGKTETFSDVPVKTNIEVCSTYSKDSENYFETEAVEIAKAFMEDDELTDSKLPSHATHSLFTCPENEEMVLSNSRIGKRRGEPLILVGEPSIKRNLLNEFDRIIENQEKSLKASKSTPDGTIKDRRLFMHHVSLEPITCVPFRTTKERQEIQNPNFTAPGQEFLSKSHLYEHLTLEKSSSNLAVSGHPFYQVSATRNEKMRHLITTGRPTKVFVPPFKTKSHFHRVEQCVRNINLEENRQKQNIDGHGSDDSKNKINDNEIHQFNKNNSNQAAAVTFTKCEEEPLDLITSLQNARDIQDMRIKKKQRQRVFPQPGSLYLAKTSTLPRISLKAAVGGQVPSACSHKQLYTYGVSKHCIKINSKNAESFQFHTEDYFGKESLWTGKGIQLADGGWLIPSNDGKAGKEEFYRALCDTPGVDPKLISRIWVYNHYRWIIWKLAAMECAFPKEFANRCLSPERVLLQLKYRYDTEIDRSRRSAIKKIMERDDTAAKTLVLCVSDIISLSANISETSSNKTSSADTQKVAIIELTDGWYAVKAQLDPPLLAVLKNGRLTVGQKIILHGAELVGSPDACTPLEAPESLMLKISANSTRPARWYTKLGFFPDPRPFPLPLSSLFSDGGNVGCVDVIIQRAYPIQWMEKTSSGLYIFRNEREEEKEAAKYVEAQQKRLEALFTKIQEEFEEHEENTTKPYLPSRALTRQQVRALQDGAELYEAVKNAADPAYLEGYFSEEQLRALNNHRQMLNDKKQAQIQLEIRKAMESAEQKEQGLSRDVTTVWKLRIVSYSKKEKDSVILSIWRPSSDLYSLLTEGKRYRIYHLATSKSKSKSERANIQLAATKKTQYQQLPVSDEILFQIYQPREPLHFSKFLDPDFQPSCSEVDLIGFVVSVVKKTGLAPFVYLSDECYNLLAIKFWIDLNEDIIKPHMLIAASNLQWRPESKSGLLTLFAGDFSVFSASPKEGHFQETFNKMKNTVENIDILCNEAENKLMHILHANDPKWSTPTKDCTSGPYTAQIIPGTGNKLLMSSPNCEIYYQSPLSLCMAKRKSVSTPVSAQMTSKSCKGEKEIDDQKNCKKRRALDFLSRLPLPPPVSPICTFVSPAAQKAFQPPRSCGTKYETPIKKKELNSPQMTPFKKFNEISLLESNSIADEELALINTQALLSGSTGEKQFISVSESTRTAPTSSEDYLRLKRRCTTSLIKEQESSQASTEECEKNKQDTITTKKYI

SEQ ID NO: 45 - protein, 393 aa, Homo sapiens [sequence omitted]

SEQ ID NO: 46 - protein, 770 aa, Homo sapiens
MLPGLALLLLAAWTARALEVPTDGNAGLLAEPQIAMFCGRLNMHMNVQNGKWDSDPSGTKTCIDTKEGILQYCQEVYPELQITNVVEANQPVTIQNWCKRGRKQCKTHPHFVIPYRCLVGEFVSDALLVPDKCKFLHQERMDVCETHLHWHTVAKETCSEKSTNLHDYGMLLPCGIDKFRGVEFVCCPLAEESDNVDSADAEEDDSDVWWGGADTDYADGSEDKVVEVAEEEEVAEVEEEEADDDEDDEDGDEVEEEAEEPYEEATERTTSIATTTTTTTESVEEVVREVCSEQAETGPCRAMISRWYFDVTEGKCAPFFYGGCGGNRNNFDTEEYCMAVCGSAMSQSLLKTTQEPLARDPVKLPTTAASTPDAVDKYLETPGDENEHAHFQKAKERLEAKHRERMSQVMREWEEAERQAKNLPKADKKAVIQHFQEKVESLEQEAANERQQLVETHMARVEAMLNDRRRLALENYITALQAVPPRPRHVFNMLKKYVRAEQKDRQHTLKHFEHVRMVDPKKAAQIRSQVMTHLRVIYERMNQSLSLLYNVPAVAEEIQDEVDELLQKEQNYSDDVLANMISEPRISYGNDALMPSLTETKTTVELLPVNGEFSLDDLQPWHSFGADSVPANTENEVEPVDARPAADRGLTTRPGSGLTNIKTEEISEVKMDAEFRHDSGYEVHHQKLVFFAEDVGSNKGAIIGLMVGGVVIATVIVITLVMLKKKQYTSIHHGVVEVDAAVTPEERHLSKMQQNGYENPTYKFFEQMQN

SEQ ID NO: 47 - protein, 3144 aa, Homo sapiens
MATLEKLMKAFESLKSFQQQQQQQQQQQQQQQQQQQQQQQPPPPPPPPPPPQLPQPPPQAQPLLPQPQPPPPPPPPPPGPAVAEEPLHRPKKELSATKKDRVNHCLTICENIVAQSVRNSPEFQKLLGIAMELFLLCSDDAESDVRMVADECLNKVIKALMDSNLPRLQLELYKEIKKNGAPRSLRAALWRFAELAHLVRPQKCRPYLVNLLPCLTRTSKRPEESVQETLAAAVPKIMASFGNFANDNEIKVLLKAFIANLKSSSPTIRRTAAGSAVSICQHSRRTQYFYSWLLNVLLGLLVPVEDEHSTLLILGVLLTLRYLVPLLQQQVKDTSLKGSFGVTRKEMEVSPSAEQLVQVYELTLHHTQHQDHNVVTGALELLQQLFRTPPPELLQTLTAVGGIGQLTAAKEESGGRSRSGSIVELIAGGGSSCSPVLSRKQKGKVLLGEEEALEDDSESRSDVSSSALTASVKDEISGELAASSGVSTPGSAGHDIITEQPRSQHTLQADSVDLASCDLTSSATDGDEEDILSHSSSQVSAVPSDPAMDLNDGTQASSPISDSSQTTTEGPDSAVTPSDSSEIVLDGTDNQYLGLQIGQPQDEDEEATGILPDEASEAFRNSSMALQQAHLLKNMSHCRQPSDSSVDKFVLRDEATEPGDQENKPCRIKGDIGQSTDDDSAPLVHCVRLLSASFLLTGGKNVLVPDRDVRVSVKALALSCVGAAVALHPESFFSKLYKVPLDTTEYPEEQYVSDILNYIDHGDPQVRGATAILCGTLICSILSRSRFHVGDWMGTIRTLTGNTFSLADCIPLLRKTLKDESSVTCKLACTAVRNCVMSLCSSSYSELGLQLIIDVLTLRNSSYWLVRTELLETLAEIDFRLVSFLEAKAENLHRGAHHYTGLLKLQERVLNNVVIHLLGDEDPRVRHVAAASLIRLVPKLFYKCDQGQADPVVAVARDQSSVYLKLLMHETQPPSHFSVSTITRIYRGYNLLPSITDVTMENNLSRVIAAVSHELITSTTRALTFGCCEALCLLSTAFPVCIWSLGWHCGVPPLSASDESRKSCTVGMATMILTLLSSAWFPLDLSAHQDALILAGNLLAASAPKSLRSSWASEEEANPAATKQEEVWPALGDRALVPMVEQLFSHLLKVINICAHVLDDVAPGPAIKAALPSLTNPPSLSPIRRKGKEKEPGEQASVPLSPKKGSEASAASRQSDTSGPVTTSKSSSLGSFYHLPSYLKLHDVLKATHANYKVTLDLQNSTEKFGGFLRSALDVLSQILELATLQDIGKCVEEILGYLKSCFSREPMMATVCVQQLLKTLFGTNLASQFDGLSSNPSKSQGRAQRLGSSSVRPGLYHYCFMAPYTHFTQALADASLRNMVQAEQENDTSGWFDVLQKVSTQLKTNLTSVTKNRADKNAIHNHIRLFEPLVIKALKQYTTTTCVQLQKQVLDLLAQLVQLRVNYCLLDSDQVFIGFVLKQFEYIEVGQFRESEAIIPNIFFFLVLLSYERYHSKQIIGIPKIIQLCDGIMASGRKAVTHAIPALQPIVHDLFVLRGTNKADAGKELETQKEVVVSMLLRLIQYHQVLEMFILVLQQCHKENEDKWKRLSRQIADIILPMLAKQQMHIDSHEALGVLNTLFEILAPSSLRPVDMLLRSMFVTPNTMASVSTVQLWISGILAILRVLISQSTEDIVLSRIQELSFSPYLISCTVINRLRDGDSTSTLEEHSEGKQIKNLPEETFSRFLLQLVGILLEDIVTKQLKVEMSEQQHTFYCQELGTLLMCLIHIFKSGMFRRITAAATRLFRSDGCGGSFYTLDSLNLRARSMITTHPALVLLWCQILLLVNHTDYRWWAEVQQTPKRHSLSSTKLLSPQMSGEEEDSDLAAKLGMCNREIVRRGALILFCDYVCQNLHDSEHLTWLIVNHIQDLISLSHEPPVQDFISAVHRNSAASGLFIQAIQSRCENLSTPTMLKKTLQCLEGIHLSQSGAVLTLYVDRLLCTPFRVLARMVDILACRRVEMLLAANLQSSMAQLPMEELNRIQEYLQSSGLAQRHQRLYSLLDRFRLSTMQDSLSPSPPVSSHPLDGDGHVSLETVSPDKDWYVHLVKSQCWTRSDSALLEGAELVNRIPAEDMNAFMMNSEFNLSLLAPCLSLGMSEISGGQKSALFEAAREVTLARVSGTVQQLPAVHHVFQPELPAEPAAYWSKLNDLFGDAALYQSLPTLARALAQYLVVVSKLPSHLHLPPEKEKDIVKFVVATLEALSWHLIHEQIPLSLDLQAGLDCCCLALQLPGLWSVVSSTEFVTHACSLIYCVHFILEAVAVQPGEQLLSPERRTNTPKAISEEEEEVDPNTQNPKYITAACEMVAEMVESLQSVLALGHKRNSGVPAFLTPLLRNIIISLARLPLVNSYTRVPPLVWKLGWSPKPGGDFGTAFPEIPVEFLQEKEVFKEFIYRINTLGWTSRTQFEETWATLLGVLVTQPLVMEQEESPPEEDTERTQINVLAVQAITSLVLSAMTVPVAGNPAVSCLEQQPRNKPLKALDTRFGRKLSIIRGIVEQEIQAMVSKRENIATHHLYQAWDPVPSLSPATTGALISHEKLLLQINPERELGSMSYKLGQVSIHSVWLGNSITPLREEEWDEEEEEEADAPAPSSPPTSPVNSRKHRAGVDIHSCSQFLLELYSRWILPSSSARRTPAILISEVVRSLLVVSDLFTERNQFELMYVTLTELRRVHPSEDEILAQYLVPATCKAAAVLGMDKAVAEPVSRLLESTLRSSHLPSRVGALHGVLYVLECDLLDDTAKQLIPVISDYLLSNLKGIAHCVNIHSQQHVLVMCATAFYLIENYPLDVGPEFSASIIQMCGVMLSGSEESTPSIIYHCALRGLERLLLSEQLSRLDAESLVKLSVDRVNVHSPHRAMAALGLMLTCMYTGKEKVSPGRTSDPNPAAPDSESVIVAMERVSVLFDRIRKGFPCEARVVARILPQFLDDFFPPQDIMNKVIGEFLSNQQPYPQFMATVVYKVFQTLHSTGQSSMVRDWVMLSLSNFTQRAPVAMATWSLSCFFVSASTSPWVAAILPHVISRMGKLEQVDVNLFCLVATDFYRHQIEEELDRRAFQSVLEVVAAPGSPYHRLLTCLRNVHKVTTC

SEQ ID NO: 48 - protein, 89 aa, Homo sapiens
MGILKLQVFLIVLSVALNHLKATPIESHQVEKRKCNTATCATQRLANFLVHSSNNFGAILSSTNVGSNTYGKRNAVEVLKREPLNYLPL

SEQ ID NO: 49 - protein, 776 aa, Homo sapiens
MAEPRQEFEVMEDHAGTYGLGDRKDQGGYTMHQDQEGDTDAGLKESPLQTPTEDGSEEPGSETSDAKSTPTAEDVTAPLVDEGAPGKQAAAQPHTEIPEGTTAEEAGIGDTPSLEDEAAGHVTQEPESGKVVQEGFLREPGPPGLSHQLMSGMPGAPLLPEGPREATRQPSGTGPEDTEGGRHAPELLKHQLLGDLHQEGPPLKGAGGKERPGSKEEVDEDRDVDESSPQDSPPSKASPAQDGRPPQTAAREATSIPGFPAEGAIPLPVDFLSKVSTEIPASEPDGPSVGRAKGQDAPLEFTFHVEITPNVQKEQAHSEEHLGRAAFPGAPGEGPEARGPSLGEDTKEADLPEPSEKQPAAAPRGKPVSRVPQLKARMVSKSKDGTGSDDKKAKTSTRSSAKTLKNRPCLSPKHPTPGSSDPLIQPSSPAVCPEPPSSPKYVSSVTSRTGSSGAKEMKLKGADGKTKIATPRGAAPPGQKGQANATRIPAKTPPAPKTPPSSATKQVQRRPPPAGPRSERGEPPKSGDRSGYSSPGSPGTPGSRSRTPSLPTPPTREPKKVAVVRTPPKSPSSAKSRLQTAPVPMPDLKNVKSKIGSTENLKHQPGGGKVQIINKKLDLSNVQSKCGSKDNIKHVPGGGSVQIVYKPVDLSKVTSKCGSLGNIHHKPGGGQVEVKSEKLDFKDRVQSKIGSLDNITHVPGGGNKKIETHKLTFRENAKAKTDHGAEIVYKSPVVSGDTSPRHLSNVSSTGSIDMVDSPQLATLADEVSASLAKQGL

SEQ ID NO: 50 - protein, 253 aa, Homo sapiens
MANLGCWMLVLFVATWSDLGLCKKRPKPGGWNTGGSRYPGQGSPGGNRYPPQGGGGWGQPHGGGWGQPHGGGWGQPHGGGWGQPHGGGWGQGGGTHSQWNKPSKPKTNMKHMAGAAAAGAVVGGLGGYMLGSAMSRPIIHFGSDYEDRYYRENMHRYPNQVYYRPMDEYSNQNNFVHDCVNITIKQHTVTTTTKGENFTETDVKMMERVVEQMCITQYERESQAYYQRGSSMVLFSSPPVILLISFLIFLIVG

SEQ ID NO: 51 - protein, 140 aa, Homo sapiens
MDVFMKGLSKAKEGVVAAAEKTKQGVAEAAGKTKEGVLYVGSKTKEGVVHGVATVAEKTKEQVTNVGGAVVTGVTAVAQKTVEGAGSIAAATGFVKKDQLGKNEEGAPQEGILEDMPVDPDNEAYEMPSEEGYQDYEPEA

SEQ ID NO: 52 - protein, 140 aa, Homo sapiens; identical to SEQ ID NO: 51

SEQ ID NO: 53 - protein, 196 aa, Homo sapiens
QLVKSELEEKKSELRHKLKYVPHEYIELIEIARNSTQDRILEMKVMEFFMKVYGYRGKHLGGSRKPDGAIYTVGSPIDYGVIVDTKAYSGGYNLPIGQADEMQRYVEENQTRNKHINPNEWWKVYPSSVTEFKFLFVSGHFKGNYKAQLTRLNHITNCNGAVLSVEELLIGGEMIKAGTLTLEEVRRKFNNGEINF

SEQ ID NO: 54 - protein, 36 aa, Homo sapiens
  MOD_RES (12)..(13): Any naturally occurring amino acid
LTPEQVVAIASXXGGKQALETVQRLLPVLCQAHGGG

SEQ ID NO: 55 - protein, 36 aa, Homo sapiens
  MOD_RES (12)..(13): Any naturally occurring amino acid
LTPEQVVAIASXXGGKQALETVQRLLPVLCQAGHGG

SEQ ID NO: 56 - protein, 36 aa, Homo sapiens
  MOD_RES (12)..(13): Any naturally occurring amino acid
LTPEQVVAIASXXGGKQALETVQRLLPVLCQAHGSG

SEQ ID NO: 57 - protein, 1089 aa, Homo sapiens
  MOD_RES (188)..(189): Any naturally occurring amino acid
  MOD_RES (224)..(225): Any naturally occurring amino acid
  MOD_RES (258)..(259): Any naturally occurring amino acid
  MOD_RES (294)..(295): Any naturally occurring amino acid
  MOD_RES (328)..(329): Any naturally occurring amino acid
  MOD_RES (364)..(365): Any naturally occurring amino acid
  MOD_RES (398)..(399): Any naturally occurring amino acid
  MOD_RES (434)..(435): Any naturally occurring amino acid
  MOD_RES (468)..(469): Any naturally occurring amino acid
  MOD_RES (504)..(505): Any naturally occurring amino acid
  MOD_RES (538)..(539): Any naturally occurring amino acid
  MOD_RES (574)..(575): Any naturally occurring amino acid
  MOD_RES (608)..(609): Any naturally occurring amino acid
  MOD_RES (644)..(645): Any naturally occurring amino acid
  MOD_RES (678)..(679): Any naturally occurring amino acid
  MOD_RES (714)..(715): Any naturally occurring amino acid
  MOD_RES (748)..(749): Any naturally occurring amino acid
  MOD_RES (784)..(785): Any naturally occurring amino acid
  MOD_RES (818)..(819): Any naturally occurring amino acid
MDYKDHDGDYKDHDIDYKDDDDKMAPKKKRKVGIHGVPAAVDLRTLGYSQQQQEKIKPKVRSTVAQHHEALVGHGFTHAHIVALSQHPAALGTVAVKYQDMIAALPEATHEAIVGVGKQWSGARALEALLTVAGELRGPPLQLDTGQLLKIAKRGGVTAVEAVHAWRNALTGAPLNLTPEQVVAIASXXGGKQALETVQRLLPVLCQAGHGGLTPEQVVAIASXXGGKQALETVQRLLPVLCQAHGLTPEQVVAIASXXGGKQALETVQRLLPVLCQAGHGGLTPEQVVAIASXXGGKQALETVQRLLPVLCQAHGLTPEQVVAIASXXGGKQALETVQRLLPVLCQAGHGGLTPEQVVAIASXXGGKQALETVQRLLPVLCQAHGLTPEQVVAIASXXGGKQALETVQRLLPVLCQAGHGGLTPEQVVAIASXXGGKQALETVQRLLPVLCQAHGLTPEQVVAIASXXGGKQALETVQRLLPVLCQAGHGGLTPEQVVAIASXXGGKQALETVQRLLPVLCQAHGLTPEQVVAIASXXGGKQALETVQRLLPVLCQAGHGGLTPEQVVAIASXXGGKQALETVQRLLPVLCQAHGLTPEQVVAIASXXGGKQALETVQRLLPVLCQAGHGGLTPEQVVAIASXXGGKQALETVQRLLPVLCQAHGLTPEQVVAIASXXGGKQALETVQRLLPVLCQAGHGGLTPEQVVAIASXXGGKQALETVQRLLPVLCQAHGLTPEQVVAIASXXGGKQALETVQRLLPVLCQAGHGGLTPEQVVAIASXXGGKQALETVQRLLPVLCQAHGLTPEQVVAIASXXGGRPALESIVAQLSRPDPALAALTNDHLVALACLGGRPALDAVKKGLPHAPALIKRTNRRIPERTSHRVAGSQLVKSELEEKKSELRHKLKYVPHEYIELIEIARNSTQDRILEMKVMEFFMKVYGYRGKHLGGSRKPDGAIYTVGSPIDYGVIVDTKAYSGGYNLPIGQADEMQRYVEENQTRNKHINPNEWWKVYPSSVTEFKFLFVSGHFKGNYKAQLTRLNHITNCNGAVLSVEELLIGGEMIKAGTLTLEEVRRKFNNGEINFRS

SEQ ID NO: 58 - protein, 1107 aa, Homo sapiens
  MOD_RES (188)..(189): Any naturally occurring amino acid
  MOD_RES (224)..(225): Any naturally occurring amino acid
  MOD_RES (260)..(261): Any naturally occurring amino acid
  MOD_RES (296)..(297): Any naturally occurring amino acid
  MOD_RES (332)..(333): Any naturally occurring amino acid
  MOD_RES (368)..(369): Any naturally occurring amino acid
  MOD_RES (404)..(405): Any naturally occurring amino acid
  MOD_RES (440)..(441): Any naturally occurring amino acid
  MOD_RES (476)..(477): Any naturally occurring amino acid
  MOD_RES (512)..(513): Any naturally occurring amino acid
  MOD_RES (548)..(549): Any naturally occurring amino acid
  MOD_RES (584)..(585): Any naturally occurring amino acid
  MOD_RES (620)..(621): Any naturally occurring amino acid
  MOD_RES (656)..(657): Any naturally occurring amino acid
  MOD_RES (692)..(693): Any naturally occurring amino acid
  MOD_RES (728)..(729): Any naturally occurring amino acid
  MOD_RES (764)..(765): Any naturally occurring amino acid
  MOD_RES (800)..(801): Any naturally occurring amino acid
  MOD_RES (836)..(837): Any naturally occurring amino acid
MDYKDHDGDYKDHDIDYKDDDDKMAPKKKRKVGIHGVPAAVDLRTLGYSQQQQEKIKPKVRSTVAQHHEALVGHGFTHAHIVALSQHPAALGTVAVKYQDMIAALPEATHEAIVGVGKQWSGARALEALLTVAGELRGPPLQLDTGQLLKIAKRGGVTAVEAVHAWRNALTGAPLNLTPEQVVAIASXXGGKQALETVQRLLPVLCQAGHGGLTPEQVVAIASXXGGKQALETVQRLLPVLCQAGHGGLTPEQVVAIASXXGGKQALETVQRLLPVLCQAGHGGLTPEQVVAIASXXGGKQALETVQRLLPVLCQAGHGGLTPEQVVAIASXXGGKQALETVQRLLPVLCQAGHGGLTPEQVVAIASXXGGKQALETVQRLLPVLCQAGHGGLTPEQVVAIASXXGGKQALETVQRLLPVLCQAGHGGLTPEQVVAIASXXGGKQALETVQRLLPVLCQAGHGGLTPEQVVAIASXXGGKQALETVQRLLPVLCQAGHGGLTPEQVVAIASXXGGKQALETVQRLLPVLCQAGHGGLTPEQVVAIASXXGGKQALETVQRLLPVLCQAGHGGLTPEQVVAIASXXGGKQALETVQRLLPVLCQAGHGGLTPEQVVAIASXXGGKQALETVQRLLPVLCQAGHGGLTPEQVVAIASXXGGKQALETVQRLLPVLCQAGHGGLTPEQVVAIASXXGGKQALETVQRLLPVLCQAGHGGLTPEQVVAIASXXGGKQALETVQRLLPVLCQAGHGGLTPEQVVAIASXXGGKQALETVQRLLPVLCQAGHGGLTPEQVVAIASXXGGKQALETVQRLLPVLCQAGHGGLTPEQVVAIASXXGGRPALESIVAQLSRPDPALAALTNDHLVALACLGGRPALDAVKKGLPHAPALIKRTNRRIPERTSHRVAGSQLVKSELEEKKSELRHKLKYVPHEYIELIEIARNSTQDRILEMKVMEFFMKVYGYRGKHLGGSRKPDGAIYTVGSPIDYGVIVDTKAYSGGYNLPIGQADEMQRYVEENQTRNKHINPNEWWKVYPSSVTEFKFLFVSGHFKGNYKAQLTRLNHITNCNGAVLSVEELLIGGEMIKAGTLTLEEVRRKFNNGEINFRS

SEQ ID NO: 59 - protein, 1086 aa, Homo sapiens
  MOD_RES (188)..(189): Any naturally occurring amino acid
  MOD_RES (224)..(225): Any naturally occurring amino acid
  MOD_RES (258)..(259): Any naturally occurring amino acid
  MOD_RES (294)..(295): Any naturally occurring amino acid
  MOD_RES (328)..(329): Any naturally occurring amino acid
  MOD_RES (364)..(365): Any naturally occurring amino acid
  MOD_RES (398)..(399): Any naturally occurring amino acid
  MOD_RES (434)..(435): Any naturally occurring amino acid
  MOD_RES (468)..(469): Any naturally occurring amino acid
  MOD_RES (504)..(505): Any naturally occurring amino acid
  MOD_RES (538)..(539): Any naturally occurring amino acid
  MOD_RES (574)..(575): Any naturally occurring amino acid
  MOD_RES (608)..(609): Any naturally occurring amino acid
  MOD_RES (644)..(645): Any naturally occurring amino acid
  MOD_RES (678)..(679): Any naturally occurring amino acid
  MOD_RES (714)..(715): Any naturally occurring amino acid
  MOD_RES (748)..(749): Any naturally occurring amino acid
  MOD_RES (784)..(785): Any naturally occurring amino acid
  MOD_RES (818)..(819): Any naturally occurring amino acid
MDYKDHDGDYKDHDIDYKDDDDKMAPKKKRKVGIHGVPAAVDLRTLGYSQQQQEKIKPKVRSTVAQHHEALVGHGFTHAHIVALSQHPAALGTVAVKYQDMIAALPEATHEAIVGVGKQWSGARALEALLTVAGELRGPPLQLDTGQLLKIAKRGGVTAVEAVHAWRNALTGAPLNLTPEQVVAIASXXGGKQALETVQRLLPVLCQAGHGGLTPEQVVAIASXXGGKQALETVQRLLPVLCQAHGLTPEQVVAIASXXGGKQALETVQRLLPVLCQAGHGGLTPEQVVAIASXXGGKQALETVQRLLPVLCQAHGLTPEQVVAIASXXGGKQALETVQRLLPVLCQAGHGGLTPEQVVAIASXXGGKQALETVQRLLPVLCQAHGLTPEQVVAIASXXGGKQALETVQRLLPVLCQAGHGGLTPEQVVAIASXXGGKQALETVQRLLPVLCQAHGLTPEQVVAIASXXGGKQALETVQRLLPVLCQAGHGGLTPEQVVAIASXXGGKQALETVQRLLPVLCQAHGLTPEQVVAIASXXGGKQALETVQRLLPVLCQAGHGGLTPEQVVAIASXXGGKQALETVQRLLPVLCQAHGLTPEQVVAIASXXGGKQALETVQRLLPVLCQAGHGGLTPEQVVAIASXXGGKQALETVQRLLPVLCQAHGLTPEQVVAIASXXGGKQALETVQRLLPVLCQAGHGGLTPEQVVAIASXXGGKQALETVQRLLPVLCQAHGLTPEQVVAIASXXGGKQALETVQRLLPVLCQAGHGGLTPEQVVAIASXXGGKQALETVQRLLPVLCQAHGLTPEQVVAIASXXGGRPALESIVAQLSRPDPALAALTNDHLVALACLGGRPALDAVKKGLPHAPALIKRTNRRIPERTSHRVAGSVLEKSDIEKFKNQLRTELTNIDHSYLKGIDIASKKKTSNVENTEFEAISTKIFTDELGFSGKHLGGSNKPDGLLWDDDCAIILDSKAYSEGFPLTASHTDAMGRYLRQFTERKEEIKPTWWDIAPEHLDNTYFAYVSGSFSGNYKEQLQKFRQDTNHLGGALEFVKLLLLANNYKTQKMSKKEVKKSILDYNISY

SEQ ID NO: 60 - protein, 1104 aa, Homo sapiens
  MOD_RES (188)..(189): Any naturally occurring amino acid
  MOD_RES (224)..(225): Any naturally occurring amino acid
  MOD_RES (260)..(261): Any naturally occurring amino acid
  MOD_RES (296)..(297): Any naturally occurring amino acid
  MOD_RES (332)..(333): Any naturally occurring amino acid
  MOD_RES (368)..(369): Any naturally occurring amino acid
  MOD_RES (404)..(405): Any naturally occurring amino acid
  MOD_RES (440)..(441): Any naturally occurring amino acid
  MOD_RES (476)..(477): Any naturally occurring amino acid
  MOD_RES (512)..(513): Any naturally occurring amino acid
  MOD_RES (548)..(549): Any naturally occurring amino acid
  MOD_RES (584)..(585): Any naturally occurring amino acid
  MOD_RES (620)..(621): Any naturally occurring amino acid
  MOD_RES (656)..(657): Any naturally occurring amino acid
  MOD_RES (692)..(693): Any naturally occurring amino acid
  MOD_RES (728)..(729): Any naturally occurring amino acid
  MOD_RES (764)..(765): Any naturally occurring amino acid
  MOD_RES (800)..(801): Any naturally occurring amino acid
  MOD_RES (836)..(837): Any naturally occurring amino acid
MDYKDHDGDYKDHDIDYKDDDDKMAPKKKRKVGIHGVPAAVDLRTLGYSQQQQEKIKPKVRSTVAQHHEALVGHGFTHAHIVALSQHPAALGTVAVKYQDMIAALPEATHEAIVGVGKQWSGARALEALLTVAGELRGPPLQLDTGQLLKIAKRGGVTAVEAVHAWRNALTGAPLNLTPEQVVAIASXXGGKQALETVQRLLPVLCQAGHGGLTPEQVVAIASXXGGKQALETVQRLLPVLCQAGHGGLTPEQVVAIASXXGGKQALETVQRLLPVLCQAGHGGLTPEQVVAIASXXGGKQALETVQRLLPVLCQAGHGGLTPEQVVAIASXXGGKQALETVQRLLPVLCQAGHGGLTPEQVVAIASXXGGKQALETVQRLLPVLCQAGHGGLTPEQVVAIASXXGGKQALETVQRLLPVLCQAGHGGLTPEQVVAIASXXGGKQALETVQRLLPVLCQAGHGGLTPEQVVAIASXXGGKQALETVQRLLPVLCQAGHGGLTPEQVVAIASXXGGKQALETVQRLLPVLCQAGHGGLTPEQVVAIASXXGGKQALETVQRLLPVLCQAGHGGLTPEQVVAIASXXGGKQALETVQRLLPVLCQAGHGGLTPEQVVAIASXXGGKQALETVQRLLPVLCQAGHGGLTPEQVVAIASXXGGKQALETVQRLLPVLCQAGHGGLTPEQVVAIASXXGGKQALETVQRLLPVLCQAGHGGLTPEQVVAIASXXGGKQALETVQRLLPVLCQAGHGGLTPEQVVAIASXXGGKQALETVQRLLPVLCQAGHGGLTPEQVVAIASXXGGKQALETVQRLLPVLCQAGHGGLTPEQVVAIASXXGGRPALESIVAQLSRPDPALAALTNDHLVALACLGGRPALDAVKKGLPHAPALIKRTNRRIPERTSHRVAGSVLEKSDIEKFKNQLRTELTNIDHSYLKGIDIASKKKTSNVENTEFEAISTKIFTDELGFSGKHLGGSNKPDGLLWDDDCAIILDSKAYSEGFPLTASHTDAMGRYLRQFTERKEEIKPTWWDIAPEHLDNTYFAYVSGSFSGNYKEQLQKFRQDTNHLGGALEFVKLLLLANNYKTQKMSKKEVKKSILDYNISY

SEQ ID NO: 61 - protein, 1464 aa, Homo sapiens
MFSFVDLRLLLLLAATALLTHGQEEGQVEGQDEDIPPITCVQNGLRYHDRDVWKPEPCRICVCDNGKVLCDDVICDETKNCPGAEVPEGECCPVCPDGSESPTDQETTGVEGPKGDTGPRGPRGPAGPPGRDGIPGQPGLPGPPGPPGPPGPPGLGGNFAPQLSYGYDEKSTGGISVPGPMGPSGPRGLPGPPGAPGPQGFQGPPGEPGEPGASGPMGPRGPPGPPGKNGDDGEAGKPGRPGERGPPGPQGARGLPGTAGLPGMKGHRGFSGLDGAKGDAGPAGPKGEPGSPGENGAPGQMGPRGLPGERGRPGAPGPAGARGNDGATGAAGPPGPTGPAGPPGFPGAVGAKGEAGPQGPRGSEGPQGVRGEPGPPGPAGAAGPAGNPGADGQPGAKGANGAPGIAGAPGFPGARGPSGPQGPGGPPGPKGNSGEPGAPGSKGDTGAKGEPGPVGVQGPPGPAGEEGKRGARGEPGPTGLPGPPGERGGPGSRGFPGADGVAGPKGPAGERGSPGPAGPKGSPGEAGRPGEAGLPGAKGLTGSPGSPGPDGKTGPPGPAGQDGRPGPPGPPGARGQAGVMGFPGPKGAAGEPGKAGERGVPGPPGAVGPAGKDGEAGAQGPPGPAGPAGERGEQGPAGSPGFQGLPGPAGPPGEAGKPGEQGVPGDLGAPGPSGARGERGFPGERGVQGPPGPAGPRGANGAPGNDGAKGDAGAPGAPGSQGAPGLQGMPGERGAAGLPGPKGDRGDAGPKGADGSPGKDGVRGLTGPIGPPGPAGAPGDKGESGPSGPAGPTGARGAPGDRGEPGPPGPAGFAGPPGADGQPGAKGEPGDAGAKGDAGPPGPAGPAGPPGPIGNVGAPGAKGARGSAGPPGATGFPGAAGRVGPPGPSGNAGPPGPPGPAGKEGGKGPRGETGPAGRPGEVGPPGPPGPAGEKGSPGADGPAGAPGTPGPQGIAGQRGVVGLPGQRGERGFPGLPGPSGEPGKQGPSGASGERGPPGPMGPPGLAGPPGESGREGAPGAEGSPGRDGSPGAKGDRGETGPAGPPGAPGAPGAPGPVGPAGKSGDRGETGPAGPAGPVGPVGARGPAGPQGPRGDKGETGEQGDRGIKGHRGFSGLQGPPGPPGSPGEQGPSGASGPAGPRGPPGSAGAPGKDGLNGLPGPIGPPGPRGRTGDAGPVGPPGPPGPPGPPGPPSAGFDFSFLPQPPQEKAHDGGRYYRADDANVVRDRDLEVDTTLKSLSQQIENIRSPEGSRKNPARTCRDLKMCHSDWKSGEYWIDPNQGCNLDAIKVFCNMETGETCVYPTQPSVAQKNWYISKNPKDKRHVWFGESMTDGFQFEYGGQGSDPADVAIQLTFLRLMSTEASQNITYHCKNSVAYMDQQTGNLKKALLLQGSNEIEIRAEGNSRFTYSVTVDGCTSHTGAWGKTVIEYKTTKTSRLPIIDVAPLDVGAPDQEFGFDVGPVCFL

SEQ ID NO: 62 - protein, 1366 aa, Homo sapiens
MLSFVDTRTLLLLAVTLCLATCQSLQEETVRKGPAGDRGPRGERGPPGPPGRDGEDGPTGPPGPPGPPGPPGLGGNFAAQYDGKGVGLGPGPMGLMGPRGPPGAAGAPGPQGFQGPAGEPGEPGQTGPAGARGPAGPPGKAGEDGHPGKPGRPGERGVVGPQGARGFPGTPGLPGFKGIRGHNGLDGLKGQPGAPGVKGEPGAPGENGTPGQTGARGLPGERGRVGAPGPAGARGSDGSVGPVGPAGPIGSAGPPGFPGAPGPKGEIGAVGNAGPAGPAGPRGEVGLPGLSGPVGPPGNPGANGLTGAKGAAGLPGVAGAPGLPGPRGIPGPVGAAGATGARGLVGEPGPAGSKGESGNKGEPGSAGPQGPPGPSGEEGKRGPNGEAGSAGPPGPPGLRGSPGSRGLPGADGRAGVMGPPGSRGASGPAGVRGPNGDAGRPGEPGLMGPRGLPGSPGNIGPAGKEGPVGLPGIDGRPGPIGPAGARGEPGNIGFPGPKGPTGDPGKNGDKGHAGLAGARGAPGPDGNNGAQGPPGPQGVQGGKGEQGPPGPPGFQGLPGPSGPAGEVGKPGERGLHGEFGLPGPAGPRGERGPPGESGAAGPTGPIGSRGPSGPPGPDGNKGEPGVVGAVGTAGPSGPSGLPGERGAAGIPGGKGEKGEPGLRGEIGNPGRDGARGAPGAVGAPGPAGATGDRGEAGAAGPAGPAGPRGSPGERGEVGPAGPNGFAGPAGAAGQPGAKGERGAKGPKGENGVVGPTGPVGAAGPAGPNGPPGPAGSRGDGGPPGMTGFPGAAGRTGPPGPSGISGPPGPPGPAGKEGLRGPRGDQGPVGRTGEVGAVGPPGFAGEKGPSGEAGTAGPPGTPGPQGLLGAPGILGLPGSRGERGLPGVAGAVGEPGPLGIAGPPGARGPPGAVGSPGVNGAPGEAGRDGNPGNDGPPGRDGQPGHKGERGYPGNIGPVGAAGAPGPHGPVGPAGKHGNRGETGPSGPVGPAGAVGPRGPSGPQGIRGDKGEPGEKGPRGLPGLKGHNGLQGLPGIAGHHGDQGAPGSVGPAGPRGPAGPSGPAGKDGRTGHPGTVGPAGIRGPQGHQGPAGPPGPPGPPGPPGVSGGGYDFGYDGDFYRADQPRSAPSLRPKDYEVDATLKSLNNQIETLLTPEGSRKNPARTCRDLRLSHPEWSSGYYWIDPNQGCTMDAIKVYCDFSTGETCIRAQPENIPAKNWYRSSKDKKHVWLGETINAGSQFEYNVEGVTSKEMATQLAFMRLLANYASQNITYHCKNSIAYMDEETGNLKKAVILQGSNDVELVAEGNSRFTYTVLVDGCSKKTNEWGKTIIEYKTNKPSRLPFLDIAPLDIGGADQEFFVDIGPVCFK

SEQ ID NO: 63 - protein, 1487 aa, Homo sapiens
MIRLGAPQTLVLLTLLVAAVLRCQGQDVQEAGSCVQDGQRYNDKDVWKPEPCRICVCDTGTVLCDDIICEDVKDCLSPEIPFGECCPICPTDLATASGQPGPKGQKGEPGDIKDIVGPKGPPGPQGPAGEQGPRGDRGDKGEKGAPGPRGRDGEPGTPGNPGPPGPPGPPGPPGLGGNFAAQMAGGFDEKAGGAQLGVMQGPMGPMGPRGPPGPAGAPGPQGFQGNPGEPGEPGVSGPMGPRGPPGPPGKPGDDGEAGKPGKAGERGPPGPQGARGFPGTPGLPGVKGHRGYPGLDGAKGEAGAPGVKGESGSPGENGSPGPMGPRGLPGERGRTGPAGAAGARGNDGQPGPAGPPGPVGPAGGPGFPGAPGAKGEAGPTGARGPEGAQGPRGEPGTPGSPGPAGASGNPGTDGIPGAKGSAGAPGIAGAPGFPGPRGPPGPQGATGPLGPKGQTGEPGIAGFKGEQGPKGEPGPAGPQGAPGPAGEEGKRGARGEPGGVGPIGPPGERGAPGNRGFPGQDGLAGPKGAPGERGPSGLAGPKGANGDPGRPGEPGLPGARGLTGRPGDAGPQGKVGPSGAPGEDGRPGPPGPQGARGQPGVMGFPGPKGANGEPGKAGEKGLPGAPGLRGLPGKDGETGAAGPPGPAGPAGERGEQGAPGPSGFQGLPGPPGPPGEGGKPGDQGVPGEAGAPGLVGPRGERGFPGERGSPGAQGLQGPRGLPGTPGTDGPKGASGPAGPPGAQGPPGLQGMPGERGAAGIAGPKGDRGDVGEKGPEGAPGKDGGRGLTGPIGPPGPAGANGEKGEVGPPGPAGSAGARGAPGERGETGPPGPAGFAGPPGADGQPGAKGEQGEAGQKGDAGAPGPQGPSGAPGPQGPTGVTGPKGARGAQGPPGATGFPGAAGRVGPPGSNGNPGPPGPPGPSGKDGPKGARGDSGPPGRAGEPGLQGPAGPPGEKGEPGDDGPSGAEGPPGPQGLAGQRGIVGLPGQRGERGFPGLPGPSGEPGKQGAPGASGDRGPPGPVGPPGLTGPAGEPGREGSPGADGPPGRDGAAGVKGDRGETGAVGAPGAPGPPGSPGPAGPTGKQGDRGEAGAQGPMGPSGPAGARGIQGPQGPRGDKGEAGEPGERGLKGHRGFTGLQGLPGPPGPSGDQGASGPAGPSGPRGPPGPVGPSGKDGANGIPGPIGPPGPRGRSGETGPAGPPGNPGPPGPPGPPGPGIDMSAFAGLGPREKGPDPLQYMRADQAAGGLRQHDAEVDATLKSLNNQIESIRSPEGSRKNPARTCRDLKLCHPEWKSGDYWIDPNQGCTLDAMKVFCNMETGETCVYPNPANVPKKNWWSSKSKEKKHIWFGETINGGFHFSYGDDNLAPNTANVQMTFLRLLSTEGSQNITYHCKNSIAYLDEAAGNLKKALLIQGSNDVEIRAEGNSRFTYTALKDGCTKHTGKWGKTVIEYRSQKTSRLPIIDIAPMDIGGPEQEFGVDIGPVCFL

SEQ ID NO: 64 - protein, 1418 aa, Homo sapiens
MIRLGAPQTLVLLTLLVAAVLRCQGQDVRQPGPKGQKGEPGDIKDIVGPKGPPGPQGPAGEQGPRGDRGDKGEKGAPGPRGRDGEPGTPGNPGPPGPPGPPGPPGLGGNFAAQMAGGFDEKAGGAQLGVMQGPMGPMGPRGPPGPAGAPGPQGFQGNPGEPGEPGVSGPMGPRGPPGPPGKPGDDGEAGKPGKAGERGPPGPQGARGFPGTPGLPGVKGHRGYPGLDGAKGEAGAPGVKGESGSPGENGSPGPMGPRGLPGERGRTGPAGAAGARGNDGQPGPAGPPGPVGPAGGPGFPGAPGAKGEAGPTGARGPEGAQGPRGEPGTPGSPGPAGASGNPGTDGIPGAKGSAGAPGIAGAPGFPGPRGPPGPQGATGPLGPKGQTGEPGIAGFKGEQGPKGEPGPAGPQGAPGPAGEEGKRGARGEPGGVGPIGPPGERGAPGNRGFPGQDGLAGPKGAPGERGPSGLAGPKGANGDPGRPGEPGLPGARGLTGRPGDAGPQGKVGPSGAPGEDGRPGPPGPQGARGQPGVMGFPGPKGANGEPGKAGEKGLPGAPGLRGLPGKDGETGAAGPPGPAGPAGERGEQGAPGPSGFQGLPGPPGPPGEGGKPGDQGVPGEAGAPGLVGPRGERGFPGERGSPGAQGLQGPRGLPGTPGTDGPKGASGPAGPPGAQGPPGLQGMPGERGAAGIAGPKGDRGDVGEKGPEGAPGKDGGRGLTGPIGPPGPAGANGEKGEVGPPGPAGSAGARGAPGERGETGPPGPAGFAGPPGADGQPGAKGEQGEAGQKGDAGAPGPQGPSGAPGPQGPTGVTGPKGARGAQGPPGATGFPGAAGRVGPPGSNGNPGPPGPPGPSGKDGPKGARGDSGPPGRAGEPGLQGPAGPPGEKGEPGDDGPSGAEGPPGPQGLAGQRGIVGLPGQRGERGFPGLPGPSGEPGKQGAPGASGDRGPPGPVGPPGLTGPAGEPGREGSPGADGPPGRDGAAGVKGDRGETGAVGAPGAPGPPGSPGPAGPTGKQGDRGEAGAQGPMGPSGPAGARGIQGPQGPRGDKGEAGEPGERGLKGHRGFTGLQGLPGPPGPSGDQGASGPAGPSGPRGPPGPVGPSGKDGANGIPGPIGPPGPRGRSGETGPAGPPGNPGPPGPPGPPGPGIDMSAFAGLGPREKGPDPLQYMRADQAAGGLRQHDAEVDATLKSLNNQIESIRSPEGSRKNPARTCRDLKLCHPEWKSGDYWIDPNQGCTLDAMKVFCNMETGETCVYPNPANVPKKNWWSSKSKEKKHIWFGETINGGFHFSYGDDNLAPNTANVQMTFLRLLSTEGSQNITYHCKNSIAYLDEAAGNLKKALLIQGSNDVEIRAEGNSRFTYTALKDGCTKHTGKWGKTVIEYRSQKTSRLPIIDIAPMDIGGPEQEFGVDIGPVCFL

SEQ ID NO: 65 - protein, 1466 aa, Homo sapiens
MMSFVQKGSWLLLALLHPTIILAQQEAVEGGCSHLGQSYADRDVWKPEPCQICVCDSGSVLCDDIICDDQELDCPNPEIPFGECCAVCPQPPTAPTRPPNGQGPQGPKGDPGPPGIPGRNGDPGIPGQPGSPGSPGPPGICESCPTGPQNYSPQYDSYDVKSGVAVGGLAGYPGPAGPPGPPGPPGTSGHPGSPGSPGYQGPPGEPGQAGPSGPPGPPGAIGPSGPAGKDGESGRPGRPGERGLPGPPGIKGPAGIPGFPGMKGHRGFDGRNGEKGETGAPGLKGENGLPGENGAPGPMGPRGAPGERGRPGLPGAAGARGNDGARGSDGQPGPPGPPGTAGFPGSPGAKGEVGPAGSPGSNGAPGQRGEPGPQGHAGAQGPPGPPGINGSPGGKGEMGPAGIPGAPGLMGARGPPGPAGANGAPGLRGGAGEPGKNGAKGEPGPRGERGEAGIPGVPGAKGEDGKDGSPGEPGANGLPGAAGERGAPGFRGPAGPNGIPGEKGPAGERGAPGPAGPRGAAGEPGRDGVPGGPGMRGMPGSPGGPGSDGKPGPPGSQGESGRPGPPGPSGPRGQPGVMGFPGPKGNDGAPGKNGERGGPGGPGPQGPPGKNGETGPQGPPGPTGPGGDKGDTGPPGPQGLQGLPGTGGPPGENGKPGEPGPKGDAGAPGAPGGKGDAGAPGERGPPGLAGAPGLRGGAGPPGPEGGKGAAGPPGPPGAAGTPGLQGMPGERGGLGSPGPKGDKGEPGGPGADGVPGKDGPRGPTGPIGPPGPAGQPGDKGEGGAPGLPGIAGPRGSPGERGETGPPGPAGFPGAPGQNGEPGGKGERGAPGEKGEGGPPGVAGPPGGSGPAGPPGPQGVKGERGSPGGPGAAGFPGARGLPGPPGSNGNPGPPGPSGSPGKDGPPGPAGNTGAPGSPGVSGPKGDAGQPGEKGSPGAQGPPGAPGPLGIAGITGARGLAGPPGMPGPRGSPGPQGVKGESGKPGANGLSGERGPPGPQGLPGLAGTAGEPGRDGNPGSDGLPGRDGSPGGKGDRGENGSPGAPGAPGHPGPPGPVGPAGKSGDRGESGPAGPAGAPGPAGSRGAPGPQGPRGDKGETGERGAAGIKGHRGFPGNPGAPGSPGPAGQQGAIGSPGPAGPRGPVGPSGPPGKDGTSGHPGPIGPPGPRGNRGERGSEGSPGHPGQPGPPGPPGAPGPCCGGVGAAAIAGIGGEKAGGFAPYYGDEPMDFKINTDEIMTSLKSVNGQIESLISPDGSRKNPARNCRDLKFCHPELKSGEYWVDPNQGCKLDAIKVFCNMETGETCISANPLNVPRKHWWTDSSAEKKHVWFGESMDGGFQFSYGNPELPEDVLDVQLAFLRLLSSRASQNITYHCKNSIAYMDQASGNVKKALKLMGSNEGEFKAEGNSKFTYTVLEDGCTKHTGEWSKTVFEYRTRKAVRLPIVDIAPYDIGGPDQEFGVDVGPVCFL

SEQ ID NO: 66 - protein, 1669 aa, Homo sapiens
MGPRLSVWLLLLPAALLLHEEHSRAAAKGGCAGSGCGKCDCHGVKGQKGERGLPGLQGVIGFPGMQGPEGPQGPPGQKGDTGEPGLPGTKGTRGPPGASGYPGNPGLPGIPGQDGPPGPPGIPGCNGTKGERGPLGPPGLPGFAGNPGPPGLPGMKGDPGEILGHVPGMLLKGERGFPGIPGTPGPPGLPGLQGPVGPPGFTGPPGPPGPPGPPGEKGQMGLSFQGPKGDKGDQGVSGPPGVPGQAQVQEKGDFATKGEKGQKGEPGFQGMPGVGEKGEPGKPGPRGKPGKDGDKGEKGSPGFPGEPGYPGLIGRQGPQGEKGEAGPPGPPGIVIGTGPLGEKGERGYPGTPGPRGEPGPKGFPGLPGQPGPPGLPVPGQAGAPGFPGERGEKGDRGFPGTSLPGPSGRDGLPGPPGSPGPPGQPGYTNGIVECQPGPPGDQGPPGIPGQPGFIGEIGEKGQKGESCLICDIDGYRGPPGPQGPPGEIGFPGQPGAKGDRGLPGRDGVAGVPGPQGTPGLIGQPGAKGEPGEFYFDLRLKGDKGDPGFPGQPGMTGRAGSPGRDGHPGLPGPKGSPGSVGLKGERGPPGGVGFPGSRGDTGPPGPPGYGPAGPIGDKGQAGFPGGPGSPGLPGPKGEPGKIVPLPGPPGAEGLPGSPGFPGPQGDRGFPGTPGRPGLPGEKGAVGQPGIGFPGPPGPKGVDGLPGDMGPPGTPGRPGFNGLPGNPGVQGQKGEPGVGLPGLKGLPGLPGIPGTPGEKGSIGVPGVPGEHGAIGPPGLQGIRGEPGPPGLPGSVGSPGVPGIGPPGARGPPGGQGPPGLSGPPGIKGEKGFPGFPGLDMPGPKGDKGAQGLPGITGQSGLPGLPGQQGAPGIPGFPGSKGEMGVMGTPGQPGSPGPVGAPGLPGEKGDHGFPGSSGPRGDPGLKGDKGDVGLPGKPGSMDKVDMGSMKGQKGDQGEKGQIGPIGEKGSRGDPGTPGVPGKDGQAGQPGQPGPKGDPGISGTPGAPGLPGPKGSVGGMGLPGTPGEKGVPGIPGPQGSPGLPGDKGAKGEKGQAGPPGIGIPGLRGEKGDQGIAGFPGSPGEKGEKGSIGIPGMPGSPGLKGSPGSVGYPGSPGLPGEKGDKGLPGLDGIPGVKGEAGLPGTPGPTGPAGQKGEPGSDGIPGSAGEKGEPGLPGRGFPGFPGAKGDKGSKGEVGFPGLAGSPGIPGSKGEQGFMGPPGPQGQPGLPGSPGHATEGPKGDRGPQGQPGLPGLPGPMGPPGLPGIDGVKGDKGNPGWPGAPGVPGPKGDPGFQGMPGIGGSPGITGSKGDMGPPGVPGFQGPKGLPGLQGIKGDQGDQGVPGAKGLPGPPGPPGPYDIIKGEPGLPGPEGPPGLKGLQGLPGPKGQQGVTGLVGIPGPPGIPGFDGAPGQKGEMGPAGPTGPRGFPGPPGPDGLPGSMGPPGTPSVDHGFLVTRHSQTIDDPQCPSGTKILYHGYSLLYVQGNERAHGQDLGTAGSCLRKFSTMPFLFCNINNVCNFASRNDYSYWLSTPEPMPMSMAPITGENIRPFISRCAVCEAPAMVMAVHSQTIQIPPCPSGWSSLWIGYSFVMHTSAGAEGSGQALASPGSCLEEFRSAPFIECHGRGTCNYYANAYSFWLATIERSEMFKKPTPSTLKAGELRTHVSRCQVCMRRT

SEQ ID NO: 67 - protein, 1712 aa, Homo sapiens
MGRDQRAVAGPALRRWLLLGTVTVGFLAQSVLAGVKKFDVPCGGRDCSGGCQCYPEKGGRGQPGPVGPQGYNGPPGLQGFPGLQGRKGDKGERGAPGVTGPKGDVGARGVSGFPGADGIPGHPGQGGPRGRPGYDGCNGTQGDSGPQGPPGSEGFTGPPGPQGPKGQKGEPYALPKEERDRYRGEPGEPGLVGFQGPPGRPGHVGQMGPVGAPGRPGPPGPPGPKGQQGNRGLGFYGVKGEKGDVGQPGPNGIPSDTLHPIIAPTGVTFHPDQYKGEKGSEGEPGIRGISLKGEEGIMGFPGLRGYPGLSGEKGSPGQKGSRGLDGYQGPDGPRGPKGEAGDPGPPGLPAYSPHPSLAKGARGDPGFPGAQGEPGSQGEPGDPGLPGPPGLSIGDGDQRRGLPGEMGPKGFIGDPGIPALYGGPPGPDGKRGPPGPPGLPGPPGPDGFLFGLKGAKGRAGFPGLPGSPGARGPKGWKGDAGECRCTEGDEAIKGLPGLPGPKGFAGINGEPGRKGDRGDPGQHGLPGFPGLKGVPGNIGAPGPKGAKGDSRTITTKGERGQPGVPGVPGMKGDDGSPGRDGLDGFPGLPGPPGDGIKGPPGDPGYPGIPGTKGTPGEMGPPGLGLPGLKGQRGFPGDAGLPGPPGFLGPPGPAGTPGQIDCDTDVKRAVGGDRQEAIQPGCIGGPKGLPGLPGPPGPTGAKGLRGIPGFAGADGGPGPRGLPGDAGREGFPGPPGFIGPRGSKGAVGLPGPDGSPGPIGLPGPDGPPGERGLPGEVLGAQPGPRGDAGVPGQPGLKGLPGDRGPPGFRGSQGMPGMPGLKGQPGLPGPSGQPGLYGPPGLHGFPGAPGQEGPLGLPGIPGREGLPGDRGDPGDTGAPGPVGMKGLSGDRGDAGFTGEQGHPGSPGFKGIDGMPGTPGLKGDRGSPGMDGFQGMPGLKGRPGFPGSKGEAGFFGIPGLKGLAGEPGFKGSRGDPGPPGPPPVILPGMKDIKGEKGDEGPMGLKGYLGAKGIQGMPGIPGLSGIPGLPGRPGHIKGVKGDIGVPGIPGLPGFPGVAGPPGITGFPGFIGSRGDKGAPGRAGLYGEIGATGDFGDIGDTINLPGRPGLKGERGTTGIPGLKGFFGEKGTEGDIGFPGITGVTGVQGPPGLKGQTGFPGLTGPPGSQGELGRIGLPGGKGDDGWPGAPGLPGFPGLRGIRGLHGLPGTKGFPGSPGSDIHGDPGFPGPPGERGDPGEANTLPGPVGVPGQKGDQGAPGERGPPGSPGLQGFPGITPPSNISGAPGDKGAPGIFGLKGYRGPPGPPGSAALPGSKGDTGNPGAPGTPGTKGWAGDSGPQGRPGVFGLPGEKGPRGEQGFMGNTGPTGAVGDRGPKGPKGDPGFPGAPGTVGAPGIAGIPQKIAVQPGTVGPQGRRGPPGAPGEMGPQGPPGEPGFRGAPGKAGPQGRGGVSAVPGFRGDEGPIGHQGPIGQEGAPGRPGSPGLPGMPGRSVSIGYLLVKHSQTDQEPMCPVGMNKLWSGYSLLYFEGQEKAHNQDLGLAGSCLARFSTMPFLYCNPGDVCYYASRNDKSYWLSTTAPLPMMPVAEDEIKPYISRCSVCEAPAIAIAVHSQDVSIPHCPAGWRSLWIGYSFLMHTAAGDEGGGQSLVSPGSCLEDFRATPFIECNGGRGTCHYYANKYSFWLTTIPEQSFQGSPSADTLKAGLIRTHISRCQVCMKNL

SEQ ID NO: 68 - protein, 1670 aa, Homo sapiens
MSARTAPRPQVLLLPLLLVLLAAAPAASKGCVCKDKGQCFCDGAKGEKGEKGFPGPPGSPGQKGFTGPEGLPGPQGPKGFPGLPGLTGSKGVRGISGLPGFSGSPGLPGTPGNTGPYGLVGVPGCSGSKGEQGFPGLPGTLGYPGIPGAAGLKGQKGAPAKEEDIELDAKGDPGLPGAPGPQGLPGPPGFPGPVGPPGPPGFFGFPGAMGPRGPKGHMGERVIGHKGERGVKGLTGPPGPPGTVIVTLTGPDNRTDLKGEKGDKGAMGEPGPPGPSGLPGESYGSEKGAPGDPGLQGKPGKDGVPGFPGSEGVKGNRGFPGLMGEDGIKGQKGDIGPPGFRGPTEYYDTYQEKGDEGTPGPPGPRGARGPQGPSGPPGVPGSPGSSRPGLRGAPGWPGLKGSKGERGRPGKDAMGTPGSPGCAGSPGLPGSPGPPGPPGDIVFRKGPPGDHGLPGYLGSPGIPGVDGPKGEPGLLCTQCPYIPGPPGLPGLPGLHGVKGIPGRQGAAGLKGSPGSPGNTGLPGFPGFPGAQGDPGLKGEKGETLQPEGQVGVPGDPGLRGQPGRKGLDGIPGTPGVKGLPGPKGELALSGEKGDQGPPGDPGSPGSPGPAGPAGPPGYGPQGEPGLQGTQGVPGAPGPPGEAGPRGELSVSTPVPGPPGPPGPPGHPGPQGPPGIPGSLGKCGDPGLPGPDGEPGIPGIGFPGPPGPKGDQGFPGTKGSLGCPGKMGEPGLPGKPGLPGAKGEPAVAMPGGPGTPGFPGERGNSGEHGEIGLPGLPGLPGTPGNEGLDGPRGDPGQPGPPGEQGPPGRCIEGPRGAQGLPGLNGLKGQQGRRGKTGPKGDPGIPGLDRSGFPGETGSPGIPGHQGEMGPLGQRGYPGNPGILGPPGEDGVIGMMGFPGAIGPPGPPGNPGTPGQRGSPGIPGVKGQRGTPGAKGEQGDKGNPGPSEISHVIGDKGEPGLKGFAGNPGEKGNRGVPGMPGLKGLKGLPGPAGPPGPRGDLGSTGNPGEPGLRGIPGSMGNMGMPGSKGKRGTLGFPGRAGRPGLPGIHGLQGDKGEPGYSEGTRPGPPGPTGDPGLPGDMGKKGEMGQPGPPGHLGPAGPEGAPGSPGSPGLPGKPGPHGDLGFKGIKGLLGPPGIRGPPGLPGFPGSPGPMGIRGDQGRDGIPGPAGEKGETGLLRAPPGPRGNPGAQGAKGDRGAPGFPGLPGRKGAMGDAGPRGPTGIEGFPGPPGLPGAIIPGQTGNRGPPGSRGSPGAPGPPGPPGSHVIGIKGDKGSMGHPGPKGPPGTAGDMGPPGRLGAPGTPGLPGPRGDPGFQGFPGVKGEKGNPGFLGSIGPPGPIGPKGPPGVRGDPGTLKIISLPGSPGPPGTPGEPGMQGEPGPPGPPGNLGPCGPRGKPGKDGKPGTPGPAGEKGNKGSKGEPGPAGSDGLPGLKGKRGDSGSPATWTTRGFVFTRHSQTTAIPSCPEGTVPLYSGFSFLFVQGNQRAHGQDLGTLGSCLQRFTTMPFLFCNVNDVCNFASRNDYSYWLSTPALMPMNMAPITGRALEPYISRCTVCEGPAIAIAVHSQTTDIPPCPHGWISLWKGFSFIMFTSAGSEGTGQALASPGSCLEEFRASPFLECHGRGTCNYYSNSYSFWLASLNPERMFRKPIPSTVKAGELEKIISRCQVCMKKRH

SEQ ID NO: 69 - protein, 1690 aa, Homo sapiens
MWSLHIVLMRCSFRLTKSLATGPWSLILILFSVQYVYGSGKKYIGPCGGRDCSVCHCVPEKGSRGPPGPPGPQGPIGPLGAPGPIGLSGEKGMRGDRGPPGAAGDKGDKGPTGVPGFPGLDGIPGHPGPPGPRGKPGMSGHNGSRGDPGFPGGRGALGPGGPLGHPGEKGEKGNSVFILGAVKGIQGDRGDPGLPGLPGSWGAGGPAGPTGYPGEPGLVGPPGQPGRPGLKGNPGVGVKGQMGDPGEVGQQGSPGPTLLVEPPDFCLYKGEKGIKGIPGMVGLPGPPGRKGESGIGAKGEKGIPGFPGPRGDPGSYGSPGFPGLKGELGLVGDPGLFGLIGPKGDPGNRGHPGPPGVLVTPPLPLKGPPGDPGFPGRYGETGDVGPPGPPGLLGRPGEACAGMIGPPGPQGFPGLPGLPGEAGIPGRPDSAPGKPGKPGSPGLPGAPGLQGLPGSSVIYCSVGNPGPQGIKGKVGPPGGRGPKGEKGNEGLCACEPGPMGPPGPPGLPGRQGSKGDLGLPGWLGTKGDPGPPGAEGPPGLPGKHGASGPPGNKGAKGDMVVSRVKGHKGERGPDGPPGFPGQPGSHGRDGHAGEKGDPGPPGDHEDATPGGKGFPGPLGPPGKAGPVGPPGLGFPGPPGERGHPGVPGHPGVRGPDGLKGQKGDTISCNVTYPGRHGPPGFDGPPGPKGFPGPQGAPGLSGSDGHKGRPGTPGTAEIPGPPGFRGDMGDPGFGGEKGSSPVGPPGPPGSPGVNGQKGIPGDPAFGHLGPPGKRGLSGVPGIKGPRGDPGCPGAEGPAGIPGFLGLKGPKGREGHAGFPGVPGPPGHSCERGAPGIPGQPGLPGYPGSPGAPGGKGQPGDVGPPGPAGMKGLPGLPGRPGAHGPPGLPGIPGPFGDDGLPGPPGPKGPRGLPGFPGFPGERGKPGAEGCPGAKGEPGEKGMSGLPGDRGLRGAKGAIGPPGDEGEMAIISQKGTPGEPGPPGDDGFPGERGDKGTPGMQGRRGEPGRYGPPGFHRGEPGEKGQPGPPGPPGPPGSTGLRGFIGFPGLPGDQGEPGSPGPPGFSGIDGARGPKGNKGDPASHFGPPGPKGEPGSPGCPGHFGASGEQGLPGIQGPRGSPGRPGPPGSSGPPGCPGDHGMPGLRGQPGEMGDPGPRGLQGDPGIPGPPGIKGPSGSPGLNGLHGLKGQKGTKGASGLHDVGPPGPVGIPGLKGERGDPGSPGISPPGPRGKKGPPGPPGSSGPPGPAGATGRAPKDIPDPGPPGDQGPPGPDGPRGAPGPPGLPGSVDLLRGEPGDCGLPGPPGPPGPPGPPGYKGFPGCDGKDGQKGPVGFPGPQGPHGFPGPPGEKGLPGPPGRKGPTGLPGPRGEPGPPADVDDCPRIPGLPGAPGMRGPEGAMGLPGMRGPSGPGCKGEPGLDGRRGVDGVPGSPGPPGRKGDTGEDGYPGGPGPPGPIGDPGPKGFGPGYLGGFLLVLHSQTDQEPTCPLGMPRLWTGYSLLYLEGQEKAHNQDLGLAGSCLPVFSTLPFAYCNIHQVCHYAQRNDRSYWLASAAPLPMMPLSEEAIRPYVSRCAVCEAPAQAVAVHSQDQSIPPCPQTWRSLWIGYSFLMHTGAGDQGGGQALMSPGSCLEDFRAAPFLECQGRQGTCHFFANKYSFWLTTVKADLQFSSAPAPDTLKESQAQRQKISRCQVCVKYS

SEQ ID NO: 70 - protein, 1685 aa, Homo sapiens
MKLRGVSLAAGLFLLALSLWGQPAEAAACYGCSPGSKCDCSGIKGEKGERGFPGLEGHPGLPGFPGPEGPPGPRGQKGDDGIPGPPGPKGIRGPPGLPGFPGTPGLPGMPGHDGAPGPQGIPGCNGTKGERGFPGSPGFPGLQGPPGPPGIPGMKGEPGSIIMSSLPGPKGNPGYPGPPGIQGLPGPTGIPGPIGPPGPPGLMGPPGPPGLPGPKGNMGLNFQGPKGEKGEQGLQGPPGPPGQISEQKRPIDVEFQKGDQGLPGDRGPPGPPGIRGPPGPPGGEKGEKGEQGEPGKRGKPGKDGENGQPGIPGLPGDPGYPGEPGRDGEKGQKGDTGPPGPPGLVIPRPGTGITIGEKGNIGLPGLPGEKGERGFPGIQGPPGLPGPPGAAVMGPPGPPGFPGERGQKGDEGPPGISIPGPPGLDGQPGAPGLPGPPGPAGPHIPPSDEICEPGPPGPPGSPGDKGLQGEQGVKGDKGDTCFNCIGTGISGPPGQPGLPGLPGPPGSLGFPGQKGEKGQAGATGPKGLPGIPGAPGAPGFPGSKGEPGDILTFPGMKGDKGELGSPGAPGLPGLPGTPGQDGLPGLPGPKGEPGGITFKGERGPPGNPGLPGLPGNIGPMGPPGFGPPGPVGEKGIQGVAGNPGQPGIPGPKGDPGQTITQPGKPGLPGNPGRDGDVGLPGDPGLPGQPGLPGIPGSKGEPGIPGIGLPGPPGPKGFPGIPGPPGAPGTPGRIGLEGPPGPPGFPGPKGEPGFALPGPPGPPGLPGFKGALGPKGDRGFPGPPGPPGRTGLDGLPGPKGDVGPNGQPGPMGPPGLPGIGVQGPPGPPGIPGPIGQPGLHGIPGEKGDPGPPGLDVPGPPGERGSPGIPGAPGPIGPPGSPGLPGKAGASGFPGTKGEMGMMGPPGPPGPLGIPGRSGVPGLKGDDGLQGQPGLPGPTGEKGSKGEPGLPGPPGPMDPNLLGSKGEKGEPGLPGIPGVSGPKGYQGLPGDPGQPGLSGQPGLPGPPGPKGNPGLPGQPGLIGPPGLKGTIGDMGFPGPQGVEGPPGPSGVPGQPGSPGLPGQKGDKGDPGISSIGLPGLPGPKGEPGLPGYPGNPGIKGSVGDPGLPGLPGTPGAKGQPGLPGFPGTPGPPGPKGISGPPGNPGLPGEPGPVGGGGHPGQPGPPGEKGKPGQDGIPGPAGQKGEPGQPGFGNPGPPGLPGLSGQKGDGGLPGIPGNPGLPGPKGEPGFHGFPGVQGPPGPPGSPGPALEGPKGNPGPQGPPGRPGLPGPEGPPGLPGNGGIKGEKGNPGQPGLPGLPGLKGDQGPPGLQGNPGRPGLNGMKGDPGLPGVPGFPGMKGPSGVPGSAGPEGEPGLIGPPGPPGLPGPSGQSIIIKGDAGPPGIPGQPGLKGLPGPQGPQGLPGPTGPPGDPGRNGLPGFDGAGGRKGDPGLPGQPGTRGLDGPPGPDGLQGPPGPPGTSSVAHGFLITRHSQTTDAPQCPQGTLQVYEGFSLLYVQGNKRAHGQDLGTAGSCLRRFSTMPFMFCNINNVCNFASRNDYSYWLSTPEPMPMSMQPLKGQSIQPFISRCAVCEAPAVVIAVHSQTIQIPHCPQGWDSLWIGYSFMMHTSAGAEGSGQALASPGSCLEEFRSAPFIECHGRGTCNYYANSYSFWLATVDVSDMFSKPQSETLKAGDLRTRISRCQVCMKRT

SEQ ID NO: 71 - protein, 1691 aa, Homo sapiens
MLINKLWLLLVTLCLTEELAAAGEKSYGKPCGGQDCSGSCQCFPEKGARGRPGPIGIQGPTGPQGFTGSTGLSGLKGERGFPGLLGPYGPKGDKGPMGVPGFLGINGIPGHPGQPGPRGPPGLDGCNGTQGAVGFPGPDGYPGLLGPPGLPGQKGSKGDPVLAPGSFKGMKGDPGLPGLDGITGPQGAPGFPGAVGPAGPPGLQGPPGPPGPLGPDGNMGLGFQGEKGVKGDVGLPGPAGPPPSTGELEFMGFPKGKKGSKGEPGPKGFPGISGPPGFPGLGTTGEKGEKGEKGIPGLPGPRGPMGSEGVQGPPGQQGKKGTLGFPGLNGFQGIEGQKGDIGLPGPDVFIDIDGAVISGNPGDPGVPGLPGLKGDEGIQGLRGPSGVPGLPALSGVPGALGPQGFPGLKGDQGNPGRTTIGAAGLPGRDGLPGPPGPPGPPSPEFETETLHNKESGFPGLRGEQGPKGNLGLKGIKGDSGFCACDGGVPNTGPPGEPGPPGPWGLIGLPGLKGARGDRGSGGAQGPAGAPGLVGPLGPSGPKGKKGEPILSTIQGMPGDRGDSGSQGFRGVIGEPGKDGVPGLPGLPGLPGDGGQGFPGEKGLPGLPGEKGHPGPPGLPGNGLPGLPGPRGLPGDKGKDGLPGQQGLPGSKGITLPCIIPGSYGPSGFPGTPGFPGPKGSRGLPGTPGQPGSSGSKGEPGSPGLVHLPELPGFPGPRGEKGLPGFPGLPGKDGLPGMIGSPGLPGSKGATGDIFGAENGAPGEQGLQGLTGHKGFLGDSGLPGLKGVHGKPGLLGPKGERGSPGTPGQVGQPGTPGSSGPYGIKGKSGLPGAPGFPGISGHPGKKGTRGKKGPPGSIVKKGLPGLKGLPGNPGLVGLKGSPGSPGVAGLPALSGPKGEKGSVGFVGFPGIPGLPGIPGTRGLKGIPGSTGKMGPSGRAGTPGEKGDRGNPGPVGIPSPRRPMSNLWLKGDKGSQGSAGSNGFPGPRGDKGEAGRPGPPGLPGAPGLPGIIKGVSGKPGPPGFMGIRGLPGLKGSSGITGFPGMPGESGSQGIRGSPGLPGASGLPGLKGDNGQTVEISGSPGPKGQPGESGFKGTKGRDGLIGNIGFPGNKGEDGKVGVSGDVGLPGAPGFPGVAGMRGEPGLPGSSGHQGAIGPLGSPGLIGPKGFPGFPGLHGLNGLPGTKGTHGTPGPSITGVPGPAGLPGPKGEKGYPGIGIGAPGKPGLRGQKGDRGFPGLQGPAGLPGAPGISLPSLIAGQPGDPGRPGLDGERGRPGPAGPPGPPGPSSNQGDTGDPGFPGIPGPKGPKGDQGIPGFSGLPGELGLKGMRGEPGFMGTPGKVGPPGDPGFPGMKGKAGPRGSSGLQGDPGQTPTAEAVQVPPGPLGLPGIDGIPGLTGDPGAQGPVGLQGSKGLPGIPGKDGPSGLPGPPGALGDPGLPGLQGPPGFEGAPGQQGPFGMPGMPGQSMRVGYTLVKHSQSEQVPPCPIGMSQLWVGYSLLFVEGQEKAHNQDLGFAGSCLPRFSTMPFIYCNINEVCHYARRNDKSYWLSTTAPIPMMPVSQTQIPQYISRCSVCEAPSQAIAVHSQDITIPQCPLGWRSLWIGYSFLMHTAAGAEGGGQSLVSPGSCLEDFRATPFIECSGARGTCHYFANKYSFWLTTVEERQQFGELPVSETLKAGQLHTRVSRCQVCMKSL

SEQ ID NO: 72 - protein, 1838 aa, Homo sapiens
MDVHTRWKARSALRPGAPLLPPLLLLLLWAPPPSRAAQPADLLKVLDFHNLPDGITKTTGFCATRRSSKGPDVAYRVTKDAQLSAPTKQLYPASAFPEDFSILTTVKAKKGSQAFLVSIYNEQGIQQIGLELGRSPVFLYEDHTGKPGPEDYPLFRGINLSDGKWHRIALSVHKKNVTLILDCKKKTTKFLDRSDHPMIDINGIIVFGTRILDEEVFEGDIQQLLFVSDHRAAYDYCEHYSPDCDTAVPDTPQSQDPNPDEYYTEGDGEGETYYYEYPYYEDPEDLGKEPTPSKKPVEAAKETTEVPEELTPTPTEAAPMPETSEGAGKEEDVGIGDYDYVPSEDYYTPSPYDDLTYGEGEENPDQPTDPGAGAEIPTSTADTSNSSNPAPPPGEGADDLEGEFTEETIRNLDENYYDPYYDPTSSPSEIGPGMPANQDTIYEGIGGPRGEKGQKGEPAIIEPGMLIEGPPGPEGPAGLPGPPGTMGPTGQVGDPGERGPPGRPGLPGADGLPGPPGTMLMLPFRFGGGGDAGSKGPMVSAQESQAQAILQQARLALRGPAGPMGLTGRPGPVGPPGSGGLKGEPGDVGPQGPRGVQGPPGPAGKPGRRGRAGSDGARGMPGQTGPKGDRGFDGLAGLPGEKGHRGDPGPSGPPGPPGDDGERGDDGEVGPRGLPGEPGPRGLLGPKGPPGPPGPPGVTGMDGQPGPKGNVGPQGEPGPPGQQGNPGAQGLPGPQGAIGPPGEKGPLGKPGLPGMPGADGPPGHPGKEGPPGEKGGQGPPGPQGPIGYPGPRGVKGADGIRGLKGTKGEKGEDGFPGFKGDMGIKGDRGEIGPPGPRGEDGPEGPKGRGGPNGDPGPLGPPGEKGKLGVPGLPGYPGRQGPKGSIGFPGFPGANGEKGGRGTPGKPGPRGQRGPTGPRGERGPRGITGKPGPKGNSGGDGPAGPPGERGPNGPQGPTGFPGPKGPPGPPGKDGLPGHPGQRGETGFQGKTGPPGPPGVVGPQGPTGETGPMGERGHPGPPGPPGEQGLPGLAGKEGTKGDPGPAGLPGKDGPPGLRGFPGDRGLPGPVGALGLKGNEGPPGPPGPAGSPGERGPAGAAGPIGIPGRPGPQGPPGPAGEKGAPGEKGPQGPAGRDGLQGPVGLPGPAGPVGPPGEDGDKGEIGEPGQKGSKGDKGEQGPPGPTGPQGPIGQPGPSGADGEPGPRGQQGLFGQKGDEGPRGFPGPPGPVGLQGLPGPPGEKGETGDVGQMGPPGPPGPRGPSGAPGADGPQGPPGGIGNPGAVGEKGEPGEAGEPGLPGEGGPPGPKGERGEKGESGPSGAAGPPGPKGPPGDDGPKGSPGPVGFPGDPGPPGEPGPAGQDGPPGDKGDDGEPGQTGSPGPTGEPGPSGPPGKRGPPGPAGPEGRQGEKGAKGEAGLEGPPGKTGPIGPQGAPGKPGPDGLRGIPGPVGEQGLPGSPGPDGPPGPMGPPGLPGLKGDSGPKGEKGHPGLIGLIGPPGEQGEKGDRGLPGPQGSSGPKGEQGITGPSGPIGPPGPPGLPGPPGPKGAKGSSGPTGPKGEAGHPGPPGPPGPPGEVIQPLPIQASRTRRNIDASQLLDDGNGENYVDYADGMEEIFGSLNSLKLEIEQMKRPLGTQQNPARTCKDLQLCHPDFPDGEYWVDPNQGCSRDSFKVYCNFTAGGSTCVFPDKKSEGARITSWPKENPGSWFSEFKRGKLLSYVDAEGNPVGVVQMTFLRLLSASAHQNVTYHCYQSVAWQDAATGSYDKALRFLGSNDEEMSYDNNPYIRALVDGCATKKGYQKTVLEIDTPKVEQVPIVDIMFNDFGEASQKFGFEVGPACFMG

SEQ ID NO: 73 - protein, 1499 aa, Homo sapiens
MMANWAEARPLLILIVLLGQFVSIKAQEEDEDEGYGEEIACTQNGQMYLNRDIWKPAPCQICVCDNGAILCDKIECQDVLDCADPVTPPGECCPVCSQTPGGGNTNFGRGRKGQKGEPGLVPVVTGIRGRPGPAGPPGSQGPRGERGPKGRPGPRGPQGIDGEPGVPGQPGAPGPPGHPSHPGPDGLSRPFSAQMAGLDEKSGLGSQVGLMPGSVGPVGPRGPQGLQGQQGGAGPTGPPGEPGDPGPMGPIGSRGPEGPPGKPGEDGEPGRNGNPGEVGFAGSPGARGFPGAPGLPGLKGHRGHKGLEGPKGEVGAPGSKGEAGPTGPMGAMGPLGPRGMPGERGRLGPQGAPGQRGAHGMPGKPGPMGPLGIPGSSGFPGNPGMKGEAGPTGARGPEGPQGQRGETGPPGPVGSPGLPGAIGTDGTPGAKGPTGSPGTSGPPGSAGPPGSPGPQGSTGPQGIRGQPGDPGVPGFKGEAGPKGEPGPHGIQGPIGPPGEEGKRGPRGDPGTVGPPGPVGERGAPGNRGFPGSDGLPGPKGAQGERGPVGSSGPKGSQGDPGRPGEPGLPGARGLTGNPGVQGPEGKLGPLGAPGEDGRPGPPGSIGIRGQPGSMGLPGPKGSSGDPGKPGEAGNAGVPGQRGAPGKDGEVGPSGPVGPPGLAGERGEQGPPGPTGFQGLPGPPGPPGEGGKPGDQGVPGDPGAVGPLGPRGERGNPGERGEPGITGLPGEKGMAGGHGPDGPKGSPGPSGTPGDTGPPGLQGMPGERGIAGTPGPKGDRGGIGEKGAEGTAGNDGARGLPGPLGPPGPAGPTGEKGEPGPRGLVGPPGSRGNPGSRGENGPTGAVGFAGPQGPDGQPGVKGEPGEPGQKGDAGSPGPQGLAGSPGPHGPNGVPGLKGGRGTQGPPGATGFPGSAGRVGPPGPAGAPGPAGPLGEPGKEGPPGLRGDPGSHGRVGDRGPAGPPGGPGDKGDPGEDGQPGPDGPPGPAGTTGQRGIVGMPGQRGERGMPGLPGPAGTPGKVGPTGATGDKGPPGPVGPPGSNGPVGEPGPEGPAGNDGTPGRDGAVGERGDRGDPGPAGLPGSQGAPGTPGPVGAPGDAGQRGDPGSRGPIGPPGRAGKRGLPGPQGPRGDKGDHGDRGDRGQKGHRGFTGLQGLPGPPGPNGEQGSAGIPGPFGPRGPPGPVGPSGKEGNPGPLGPIGPPGVRGSVGEAGPEGPPGEPGPPGPPGPPGHLTAALGDIMGHYDESMPDPLPEFTEDQAAPDDKNKTDPGVHATLKSLSSQIETMRSPDGSKKHPARTCDDLKLCHSAKQSGEYWIDPNQGSVEDAIKVYCNMETGETCISANPSSVPRKTWWASKSPDNKPVWYGLDMNRGSQFAYGDHQSPNTAITQMTFLRLLSKEASQNITYICKNSVGYMDDQAKNLKKAVVLKGANDLDIKAEGNIRFRYIVLQDTCSKRNGNVGKTVFEYRTQNVARLPIIDLAPVDVGGTDQEFGVEIGPVCFV

SEQ ID NO: 74 - protein, 1745 aa, Homo sapiens
MGNRRDLGQPRAGLCLLLAALQLLPGTQADPVDVLKALGVQGGQAGVPEGPGFCPQRTPEGDRAFRIGQASTLGIPTWELFPEGHFPENFSLLITLRGQPANQSVLLSIYDERGARQLGLALGPALGLLGDPFRPLPQQVNLTDGRWHRVAVSIDGEMVTLVADCEAQPPVLGHGPRFISIAGLTVLGTQDLGEKTFEGDIQELLISPDPQAAFQACERYLPDCDNLAPAATVAPQGEPETPRPRRKGKGKGRKKGRGRKGKGRKKNKEIWTSSPPPDSAENQTSTDIPKTETPAPNLPPTPTPLVVTSTVTTGLNATILERSLDPDSGTELGTLETKAAREDEEGDDSTMGPDFRAAEYPSRTQFQIFPGAGEKGAKGEPAVIEKGQQFEGPPGAPGPQGVVGPSGPPGPPGFPGDPGPPGPAGLPGIPGIDGIRGPPGTVIMMPFQFAGGSFKGPPVSFQQAQAQAVLQQTQLSMKGPPGPVGLTGRPGPVGLPGHPGLKGEEGAEGPQGPRGLQGPHGPPGRVGKMGRPGADGARGLPGDTGPKGDRGFDGLPGLPGEKGQRGDFGHVGQPGPPGEDGERGAEGPPGPTGQAGEPGPRGLLGPRGSPGPTGRPGVTGIDGAPGAKGNVGPPGEPGPPGQQGNHGSQGLPGPQGLIGTPGEKGPPGNPGIPGLPGSDGPLGHPGHEGPTGEKGAQGPPGSAGPPGYPGPRGVKGTSGNRGLQGEKGEKGEDGFPGFKGDVGLKGDQGKPGAPGPRGEDGPEGPKGQAGQAGEEGPPGSAGEKGKLGVPGLPGYPGRPGPKGSIGFPGPLGPIGEKGKSGKTGQPGLEGERGPPGSRGERGQPGATGQPGPKGDVGQDGAPGIPGEKGLPGLQGPPGFPGPKGPPGHQGKDGRPGHPGQRGELGFQGQTGPPGPAGVLGPQGKTGEVGPLGERGPPGPPGPPGEQGLPGLEGREGAKGELGPPGPLGKEGPAGLRGFPGPKGGPGDPGPTGLKGDKGPPGPVGANGSPGERGPLGPAGGIGLPGQSGSEGPVGPAGKKGSRGERGPPGPTGKDGIPGPLGPLGPPGAAGPSGEEGDKGDVGAPGHKGSKGDKGDAGPPGQPGIRGPAGHPGPPGADGAQGRRGPPGLFGQKGDDGVRGFVGVIGPPGLQGLPGPPGEKGEVGDVGSMGPHGAPGPRGPQGPTGSEGTPGLPGGVGQPGAVGEKGERGDAGDPGPPGAPGIPGPKGDIGEKGDSGPSGAAGPPGKKGPPGEDGAKGSVGPTGLPGDLGPPGDPGVSGIDGSPGEKGDPGDVGGPGPPGASGEPGAPGPPGKRGPSGHMGREGREGEKGAKGEPGPDGPPGRTGPMGARGPPGRVGPEGLRGIPGPVGEPGLLGAPGQMGPPGPLGPSGLPGLKGDTGPKGEKGHIGLIGLIGPPGEAGEKGDQGLPGVQGPPGPKGDPGPPGPIGSLGHPGPPGVAGPLGQKGSKGSPGSMGPRGDTGPAGPPGPPGAPAELHGLRRRRRFVPVPLPVVEGGLEEVLASLTSLSLELEQLRRPPGTAERPGLVCHELHRNHPHLPDGEYWIDPNQGCARDSFRVFCNFTAGGETCLYPDKKFEIVKLASWSKEKPGGWYSTFRRGKKFSYVDADGSPVNVVQLNFLKLLSATARQNFTYSCQNAAAWLDEATGDYSHSARFLGTNGEELSFNQTTAATVSVPQDGCRLRKGQTKTLFEFSSSRAGFLPLWDVAATDFGQTNQKFGFELGPVCFSS

SEQ ID NO: 75 - protein, 1028 aa, Homo sapiens
MRAARALLPLLLQACWTAAQDEPETPRAVAFQDCPVDLFFVLDTSESVALRLKPYGALVDKVKSFTKRFIDNLRDRYYRCDRNLVWNAGALHYSDEVEIIQGLTRMPGGRDALKSSVDAVKYFGKGTYTDCAIKKGLEQLLVGGSHLKENKYLIVVTDGHPLEGYKEPCGGLEDAVNEAKHLGVKVFSVAITPDHLEPRLSIIATDHTYRRNFTAADWGQSRDAEEAISQTIDTIVDMIKNNVEQVCCSFECQPARGPPGLRGDPGFEGERGKPGLPGEKGEAGDPGRPGDLGPVGYQGMKGEKGSRGEKGSRGPKGYKGEKGKRGIDGVDGVKGEMGYPGLPGCKGSPGFDGIQGPPGPKGDPGAFGLKGEKGEPGADGEAGRPGSSGPSGDEGQPGEPGPPGEKGEAGDEGNPGPDGAPGERGGPGERGPRGTPGTRGPRGDPGEAGPQGDQGREGPVGVPGDPGEAGPIGPKGYRGDEGPPGSEGARGAPGPAGPPGDPGLMGERGEDGPAGNGTEGFPGFPGYPGNRGAPGINGTKGYPGLKGDEGEAGDPGDDNNDIAPRGVKGAKGYRGPEGPQGPPGHQGPPGPDECEILDIIMKMCSCCECKCGPIDLLFVLDSSESIGLQNFEIAKDFVVKVIDRLSRDELVKFEPGQSYAGVVQYSHSQMQEHVSLRSPSIRNVQELKEAIKSLQWMAGGTFTGEALQYTRDQLLPPSPNNRIALVITDGRSDTQRDTTPLNVLCSPGIQVVSVGIKDVFDFIPGSDQLNVISCQGLAPSQGRPGLSLVKENYAELLEDAFLKNVTAQICIDKKCPDYTCPITFSSPADITILLDGSASVGSHNFDTTKRFAKRLAERFLTAGRTDPAHDVRVAVVQYSGTGQQRPERASLQFLQNYTALASAVDAMDFINDATDVNDALGYVTRFYREASSGAAKKRLLLFSDGNSQGATPAAIEKAVQEAQRAGIEIFVVVVGRQVNEPHIRVLVTGKTAEYDVAYGESHLFRVPSYQALLRGVFHQTVSRKVALG

SEQ ID NO: 76 - protein, 1019 aa, Homo sapiens
MLQGTCSVLLLWGILGAIQAQQQEVISPDTTERNNNCPEKTDCPIHVYFVLDTSESVTMQSPTDILLFHMKQFVPQFISQLQNEFYLDQVALSWRYGGLHFSDQVEVFSPPGSDRASFIKNLQGISSFRRGTFTDCALANMTEQIRQDRSKGTVHFAVVITDGHVTGSPCGGIKLQAERAREEGIRLFAVAPNQNLKEQGLRDIASTPHELYRNDYATMLPDSTEIDQDTINRIIKVMKHEAYGECYKVSCLEIPGPSGPKGYRGQKGAKGNMGEPGEPGQKGRQGDPGIEGPIGFPGPKGVPGFKGEKGEFGADGRKGAPGLAGKNGTDGQKGKLGRIGPPGCKGDPGNRGPDGYPGEAGSPGERGDQGGKGDPGRPGRRGPPGEIGAKGSKGYQGNSGAPGSPGVKGAKGGPGPRGPKGEPGRRGDPGTKGSPGSDGPKGEKGDPGPEGPRGLAGEVGNKGAKGDRGLPGPRGPQGALGEPGKQGSRGDPGDAGPRGDSGQPGPKGDPGRPGFSYPGPRGAPGEKGEPGPRGPEGGRGDFGLKGEPGRKGEKGEPADPGPPGEPGPRGPRGVPGPEGEPGPPGDPGLTECDVMTYVRETCGCCDCEKRCGALDVVFVIDSSESIGYTNFTLEKNFVINVVNRLGAIAKDPKSETGTRVGVVQYSHEGTFEAIQLDDERIDSLSSFKEAVKNLEWIAGGTWTPSALKFAYDRLIKESRRQKTRVFAVVITDGRHDPRDDDLNLRALCDRDVTVTAIGIGDMFHEKHESENLYSIACDKPQQVRNMTLFSDLVAEKFIDDMEDVLCPDPQIVCPDLPCQTELSVAQCTQRPVDIVFLLDGSERLGEQNFHKARRFVEQVARRLTLARRDDDPLNARVALLQFGGPGEQQVAFPLSHNLTAIHEALETTQYLNSFSHVGAGVVHAINAIVRSPRGGARRHAELSFVFLTDGVTGNDSLHESAHSMRKQNVVPTVLALGSDVDMDVLTTLSLGDRAAVFHEKDYDSLAQPGFFDRFIRWIC

SEQ ID NO: 77 - protein, 3177 aa, Homo sapiens
MRKHRHLPLVAVFCLFLSGFPTTHAQQQQADVKNGAAADIIFLVDSSWTIGEEHFQLVREFLYDVVKSLAVGENDFHFALVQFNGNPHTEFLLNTYRTKQEVLSHISNMSYIGGTNQTGKGLEYIMQSHLTKAAGSRAGDGVPQVIVVLTDGHSKDGLALPSAELKSADVNVFAIGVEDADEGALKEIASEPLNMHMFNLENFTSLHDIVGNLVSCVHSSVSPERAGDTETLKDITAQDSADIIFLIDGSNNTGSVNFAVILDFLVNLLEKLPIGTQQIRVGVVQFSDEPRTMFSLDTYSTKAQVLGAVKALGFAGGELANIGLALDFVVENHFTRAGGSRVEEGVPQVLVLISAGPSSDEIRYGVVALKQASVFSFGLGAQAASRAELQHIATDDNLVFTVPEFRSFGDLQEKLLPYIVGVAQRHIVLKPPTIVTQVIEVNKRDIVFLVDGSSALGLANFNAIRDFIAKVIQRLEIGQDLIQVAVAQYADTVRPEFYFNTHPTKREVITAVRKMKPLDGSALYTGSALDFVRNNLFTSSAGYRAAEGIPKLLVLITGGKSLDEISQPAQELKRSSIMAFAIGNKGADQAELEEIAFDSSLVFIPAEFRAAPLQGMLPGLLAPLRTLSGTPEVHSNKRDIIFLLDGSANVGKTNFPYVRDFVMNLVNSLDIGNDNIRVGLVQFSDTPVTEFSLNTYQTKSDILGHLRQLQLQGGSGLNTGSALSYVYANHFTEAGGSRIREHVPQLLLLLTAGQSEDSYLQAANALTRAGILTFCVGASQANKAELEQIAFNPSLVYLMDDFSSLPALPQQLIQPLTTYVSGGVEEVPLAQPESKRDILFLFDGSANLVGQFPVVRDFLYKIIDELNVKPEGTRIAVAQYSDDVKVESRFDEHQSKPEILNLVKRMKIKTGKALNLGYALDYAQRYIFVKSAGSRIEDGVLQFLVLLVAGRSSDRVDGPASNLKQSGVVPFIFQAKNADPAELEQIVLSPAFILAAESLPKIGDLHPQIVNLLKSVHNGAPAPVSGEKDVVFLLDGSEGVRSGFPLLKEFVQRVVESLDVGQDRVRVAVVQYSDRTRPEFYLNSYMNKQDVVNAVRQLTLLGGPTPNTGAALEFVLRNILVSSAGSRITEGVPQLLIVLTADRSGDDVRNPSVVVKRGGAVPIGIGIGNADITEMQTISFIPDFAVAIPTFRQLGTVQQVISERVTQLTREELSRLQPVLQPLPSPGVGGKRDVVFLIDGSQSAGPEFQYVRTLIERLVDYLDVGFDTTRVAVIQFSDDPKVEFLLNAHSSKDEVQNAVQRLRPKGGRQINVGNALEYVSRNIFKRPLGSRIEEGVPQFLVLISSGKSDDEVDDPAVELKQFGVAPFTIARNADQEELVKISLSPEYVFSVSTFRELPSLEQKLLTPITTLTSEQIQKLLASTRYPPPAVESDAADIVFLIDSSEGVRPDGFAHIRDFVSRIVRRLNIGPSKVRVGVVQFSNDVFPEFYLKTYRSQAPVLDAIRRLRLRGGSPLNTGKALEFVARNLFVKSAGSRIEDGVPQHLVLVLGGKSQDDVSRFAQVIRSSGIVSLGVGDRNIDRTELQTITNDPRLVFTVREFRELPNIEERIMNSFGPSAATPAPPGVDTPPPSRPEKKKADIVFLLDGSINFRRDSFQEVLRFVSEIVDTVYEDGDSIQVGLVQYNSDPTDEFFLKDFSTKRQIIDAINKVVYKGGRHANTKVGLEHLRVNHFVPEAGSRLDQRVPQIAFVITGGKSVEDAQDVSLALTQRGVKVFAVGVRNIDSEEVGKIASNSATAFRVGNVQELSELSEQVLETLHDAMHETLCPGVTDAAKACNLDVILGFDGSRDQNVFVAQKGFESKVDAILNRISQMHRVSCSGGRSPTVRVSVVANTPSGPVEAFDFDEYQPEMLEKFRNMRSQHPYVLTEDTLKVYLNKFRQSSPDSVKVVIHFTDGADGDLADLHRASENLRQEGVRALILVGLERVVNLERLMHLEFGRGFMYDRPLRLNLLDLDYELAEQLDNIAEKACCGVPCKCSGQRGDRGPIGSIGPKGIPGEDGYRGYPGDEGGPGERGPPGVNGTQGFQGCPGQRGVKGSRGFPGEKGEVGEIGLDGLDGEDGDKGLPGSSGEKGNPGRRGDKGPRGEKGERGDVGIRGDPGNPGQDSQERGPKGETGDLGPMGVPGRDGVPGGPGETGKNGGFGRRGPPGAKGNKGGPGQPGFEGEQGTRGAQGPAGPAGPPGLIGEQGISGPRGSGGAAGAPGERGRTGPLGRKGEPGEPGPKGGIGNRGPRGETGDDGRDGVGSEGRRGKKGERGFPGYPGPKGNPGEPGLNGTTGPKGIRGRRGNSGPPGIVGQKGDPGYPGPAGPKGNRGDSIDQCALIQSIKDKCPCCYGPLECPVFPTELAFALDTSEGVNQDTFGRMRDVVLSIVNDLTIAESNCPRGARVAVVTYNNEVTTEIRFADSKRKSVLLDKIKNLQVALTSKQQSLETAMSFVARNTFKRVRNGFLMRKVAVFFSNTPTRASPQLREAVLKLSDAGITPLFLTRQEDRQLINALQINNTAVGHALVLPAGRDLTDFLENVLTCHVCLDICNIDPSCGFGSWRPSFRDRRAAGSDVDIDMAFILDSAETTTLFQFNEMKKYIAYLVRQLDMSPDPKASQHFARVAVVQHAPSESVDNASMPPVKVEFSLTDYGSKEKLVDFLSRGMTQLQGTRALGSAIEYTIENVFESAPNPRDLKIVVLMLTGEVPEQQLEEAQRVILQAKCKGYFFVVLGIGRKVNIKEVYTFASEPNDVFFKLVDKSTELNEEPLMRFGRLLPSFVSSENAFYLSPDIRKQCDWFQGDQPTKNLVKFGHKQVNVPNNVTSSPTSNPVTTTKPVTTTKPVTTTTKPVTTTTKPVTIINQPSVKPAAAKPAPAKPVAAKPVATKMATVRPPVAVKPATAAKPVAAKPAAVRPPAAAAAKPVATKPEVPRPQAAKPAATKPATTKPMVKMSREVQVFEITENSAKLHWERAEPPGPYFYDLTVTSAHDQSLVLKQNLTVTDRVIGGLLAGQTYHVAVVCYLRSQVRATYHGSFSTKKSQPPPPQPARSASSSTINLMVSTEPLALTETDICKLPKDEGTCRDFILKWYYDPNTKSCARFWYGGCGGNENKFGSQKECEKVCAPVLAKPGVISVMGT

SEQ ID NO: 78 - protein, 2944 aa, Homo sapiens
MTLRLLVAALCAGILAEAPRVRAQHRERVTCTRLYAADIVFLLDGSSSIGRSNFREVRSFLEGLVLPFSGAASAQGVRFATVQYSDDPRTEFGLDALGSGGDVIRAIRELSYKGGNTRTGAAILHVADHVFLPQLARPGVPKVCILITDGKSQDLVDTAAQRLKGQGVKLFAVGIKNADPEELKRVASQPTSDFFFFVNDFSILRTLLPLVSRRVCTTAGGVPVTRPPDDSTSAPRDLVLSEPSSQSLRVQWTAASGPVTGYKVQYTPLTGLGQPLPSERQEVNVPAGETSVRLRGLRPLTEYQVTVIALYANSIGEAVSGTARTTALEGPELTIQNTTAHSLLVAWRSVPGATGYRVTWRVLSGGPTQQQELGPGQGSVLLRDLEPGTDYEVTVSTLFGRSVGPATSLMARTDASVEQTLRPVILGPTSILLSWNLVPEARGYRLEWRRETGLEPPQKVVLPSDVTRYQLDGLQPGTEYRLTLYTLLEGHEVATPATVVPTGPELPVSPVTDLQATELPGQRVRVSWSPVPGATQYRIIVRSTQGVERTLVLPGSQTAFDLDDVQAGLSYTVRVSARVGPREGSASVLTVRREPETPLAVPGLRVVVSDATRVRVAWGPVPGASGFRISWSTGSGPESSQTLPPDSTATDITGLQPGTTYQVAVSVLRGREEGPAAVIVARTDPLGPVRTVHVTQASSSSVTITWTRVPGATGYRVSWHSAHGPEKSQLVSGEATVAELDGLEPDTEYTVHVRAHVAGVDGPPASVVVRTAPEPVGRVSRLQILNASSDVLRITWVGVTGATAYRLAWGRSEGGPMRHQILPGNTDSAEIRGLEGGVSYSVRVTALVGDREGTPVSIVVTTPPEAPPALGTLHVVQRGEHSLRLRWEPVPRAQGFLLHWQPEGGQEQSRVLGPELSSYHLDGLEPATQYRVRLSVLGPAGEGPSAEVTARTESPRVPSIELRVVDTSIDSVTLAWTPVSRASSYILSWRPLRGPGQEVPGSPQTLPGISSSQRVTGLEPGVSYIFSLTPVLDGVRGPEASVTQTPVCPRGLADVVFLPHATQDNAHRAEATRRVLERLVLALGPLGPQAVQVGLLSYSHRPSPLFPLNGSHDLGIILQRIRDMPYMDPSGNNLGTAVVTAHRYMLAPDAPGRRQHVPGVMVLLVDEPLRGDIFSPIREAQASGLNVVMLGMAGADPEQLRRLAPGMDSVQTFFAVDDGPSLDQAVSGLATALCQASFTTQPRPEPCPVYCPKGQKGEPGEMGLRGQVGPPGDPGLPGRTGAPGPQGPPGSATAKGERGFPGADGRPGSPGRAGNPGTPGAPGLKGSPGLPGPRGDPGERGPRGPKGEPGAPGQVIGGEGPGLPGRKGDPGPSGPPGPRGPLGDPGPRGPPGLPGTAMKGDKGDRGERGPPGPGEGGIAPGEPGLPGLPGSPGPQGPVGPPGKKGEKGDSEDGAPGLPGQPGSPGEQGPRGPPGAIGPKGDRGFPGPLGEAGEKGERGPPGPAGSRGLPGVAGRPGAKGPEGPPGPTGRQGEKGEPGRPGDPAVVGPAVAGPKGEKGDVGPAGPRGATGVQGERGPPGLVLPGDPGPKGDPGDRGPIGLTGRAGPPGDSGPPGEKGDPGRPGPPGPVGPRGRDGEVGEKGDEGPPGDPGLPGKAGERGLRGAPGVRGPVGEKGDQGDPGEDGRNGSPGSSGPKGDRGEPGPPGPPGRLVDTGPGAREKGEPGDRGQEGPRGPKGDPGLPGAPGERGIEGFRGPPGPQGDPGVRGPAGEKGDRGPPGLDGRSGLDGKPGAAGPSGPNGAAGKAGDPGRDGLPGLRGEQGLPGPSGPPGLPGKPGEDGKPGLNGKNGEPGDPGEDGRKGEKGDSGASGREGRDGPKGERGAPGILGPQGPPGLPGPVGPPGQGFPGVPGGTGPKGDRGETGSKGEQGLPGERGLRGEPGSVPNVDRLLETAGIKASALREIVETWDESSGSFLPVPERRRGPKGDSGEQGPPGKEGPIGFPGERGLKGDRGDPGPQGPPGLALGERGPPGPSGLAGEPGKPGIPGLPGRAGGVGEAGRPGERGERGEKGERGEQGRDGPPGLPGTPGPPGPPGPKVSVDEPGPGLSGEQGPPGLKGAKGEPGSNGDQGPKGDRGVPGIKGDRGEPGPRGQDGNPGLPGERGMAGPEGKPGLQGPRGPPGPVGGHGDPGPPGAPGLAGPAGPQGPSGLKGEPGETGPPGRGLTGPTGAVGLPGPPGPSGLVGPQGSPGLPGQVGETGKPGAPGRDGASGKDGDRGSPGVPGSPGLPGPVGPKGEPGPTGAPGQAVVGLPGAKGEKGAPGGLAGDLVGEPGAKGDRGLPGPRGEKGEAGRAGEPGDPGEDGQKGAPGPKGFKGDPGVGVPGSPGPPGPPGVKGDLGLPGLPGAPGVVGFPGQTGPRGEMGQPGPSGERGLAGPPGREGIPGPLGPPGPPGSVGPPGASGLKGDKGDPGVGLPGPRGERGEPGIRGEDGRPGQEGPRGLTGPPGSRGERGEKGDVGSAGLKGDKGDSAVILGPPGPRGAKGDMGERGPRGLDGDKGPRGDNGDPGDKGSKGEPGDKGSAGLPGLRGLLGPQGQPGAAGIPGDPGSPGKDGVPGIRGEKGDVGFMGPRGLKGERGVKGACGLDGEKGDKGEAGPPGRPGLAGHKGEMGEPGVPGQSGAPGKEGLIGPKGDRGFDGQPGPKGDQGEKGERGTPGIGGFPGPSGNDGSAGPPGPPGSVGPRGPEGLQGQKGERGPPGERVVGAPGVPGAPGERGEQGRPGPAGPRGEKGEAALTEDDIRGFVRQEMSQHCACQGQFIASGSRPLPSYAADTAGSQLHAVPVLRVSHAEEEERVPPEDDEYSEYSEYSVEEYQDPEAPWDSDDPCSLPLDEGSCTAYTLRWYHRAVTGSTEACHPFVYGGCGGNANRFGTREACERRCPPRVVQSQGTGTAQD

SEQ ID NO: 79 - protein, 724 aa, Homo sapiens
MAGLTAAAPRPGVLLLLLSILHPSRPGGVPGAIPGGVPGGVFYPGAGLGALGGGALGPGGKPLKPVPGGLAGAGLGAGLGAFPAVTFPGALVPGGVADAAAAYKAAKAGAGLGGVPGVGGLGVSAGAVVPQPGAGVKPGKVPGVGLPGVYPGGVLPGARFPGVGVLPGVPTGAGVKPKAPGVGGAFAGIPGVGPFGGPQPGVPLGYPIKAPKLPGGYGLPYTTGKLPYGYGPGGVAGAAGKAGYPTGTGVGPQAAAAAAAKAAAKFGAGAAGVLPGVGGAGVPGVPGAIPGIGGIAGVGTPAAAAAAAAAAKAAKYGAAAGLVPGGPGFGPGVVGVPGAGVPGVGVPGAGIPVVPGAGIPGAAVPGVVSPEAAAKAAAKAAKYGARPGVGVGGIPTYGVGAGGFPGFGVGVGGIPGVAGVPGVGGVPGVGGVPGVGISPEAQAAAAAKAAKYGVGTPAAAAAKAAAKAAQFGLVPGVGVAPGVGVAPGVGVAPGVGLAPGVGVAPGVGVAPGVGVAPGIGPGGVAAAAKSAAKVAAKAQLRAAAGLGAGIPGLGVGVGVPGLGVGAGVPGLGVGAGVPGFGAVPGALAAAKAAKYGAAVPGVLGGLGALGGVGIPGGVVGAGPAAAAAAAKAAAKAAQFGLVGAAGLGGLGVGGLGVPGVGGLGGIPPAAAAKAAKYGAAGLGGVLGGAGQFPLGGVAARPGFGLSPIFPGGACLGKACGRKRK

SEQ ID NO: 80 - protein, 677 aa, Homo sapiens
MAGLTAAAPRPGVLLLLLSILHPSRPGGVPGAIPGGVPGGVFYPALGPGGKPLKPVPGGLAGAGLGAGLGAFPAVTFPGALVPGGVADAAAAYKAAKAGAGLGGVPGVGGLGVSAGAVVPQPGAGVKPGKVPGVGLPGVYPGGVLPGARFPGVGVLPGVPTGAGVKPKAPGVGGAFAGIPGVGPFGGPQPGVPLGYPIKAPKLPGGYGLPYTTGKLPYGYGPGGVAGAAGKAGYPTGTGVGPQAAAAAAAKAAAKFGAGAAGVLPGVGGAGVPGVPGAIPGIGGIAGVGTPAAAAAAAAAAKAAKYGAAAGLVPGGPGFGPGVVGVPGAGVPGVGVPGAGIPVVPGAGIPGAAVPGVVSPEAAAKAAAKAAKYGARPGVGVGGIPTYGVGAGGFPGFGVGVGGIPGVAGVPGVGGVPGVGGVPGVGISPEAQAAAAAKAAKYGLVPGVGVAPGVGVAPGVGVAPGVGLAPGVGVAPGVGVAPGVGVAPGIGPGGVAAAAKSAAKVAAKAQLRAAAGLGAGIPGLGVGVGVPGLGVGAGVPGLGVGAGVPGFGAVPGALAAAKAAKYGAAVPGVLGGLGALGGVGIPGGVVGAGPAAAAAAAKAAAKAAQFGLVGAAGLGGLGVGGLGVPGVGGLGGIPPAAAAKAAKYGVAARPGFGLSPIFPGGACLGKACGRKRK

SEQ ID NO: 81 - protein, 692 aa, Homo sapiens
MAGLTAAAPRPGVLLLLLSILHPSRPGGVPGAIPGGVPGGVFYPGAGLGALGGGALGPGGKPLKPVPGGLAGAGLGAGLGAFPAVTFPGALVPGGVADAAAAYKAAKAGAGLGGVPGVGGLGVSAAPSVPGAVVPQPGAGVKPGKVPGVGLPGVYPGGVLPGARFPGVGVLPGVPTGAGVKPKAPGVGGAFAGIPGVGPFGGPQPGVPLGYPIKAPKLPGGYGLPYTTGKLPYGYGPGGVAGAAGKAGYPTGTGVGPQAAAAAAAKAAAKFGAGAAGVLPGVGGAGVPGVPGAIPGIGGIAGVGTPAAAAAAAAAAKAAKYGAAAGLVPGGPGFGPGVVGVPGAGVPGVGVPGAGIPVVPGAGIPGAAVPGVVSPEAAAKAAAKAAKYGARPGVGVGGIPTYGVGAGGFPGFGVGVGGIPGVAGVPGVGGVPGVGGVPGVGISPEAQAAAAAKAAKYGLVPGVGVAPGVGVAPGVGVAPGVGLAPGVGVAPGVGVAPGVGVAPGIGPGGVAAAAKSAAKVAAKAQLRAAAGLGAGIPGLGVGVGVPGLGVGAGVPGLGVGAGVPGFGAVPGALAAAKAAKYGAAVPGVLGGLGALGGVGIPGGVVGAGPAAAAAAAKAAAKAAQFGLVGAAGLGGLGVGGLGVPGVGGLGGIPPAAAAKAAKYGVAARPGFGLSPIFPGGACLGKACGRKRK

SEQ ID NO: 82 - protein, 711 aa, Homo sapiens
MAGLTAAAPRPGVLLLLLSILHPSRPGGVPGAIPGGVPGGVFYPGAGLGALGGGALGPGGKPLKPVPGGLAGAGLGAGLGAFPAVTFPGALVPGGVADAAAAYKAAKAGAGLGGVPGVGGLGVSAAPSVPGAVVPQPGAGVKPGKVPGVGLPGVYPGGVLPGARFPGVGVLPGVPTGAGVKPKAPGVGGAFAGIPGVGPFGGPQPGVPLGYPIKAPKLPGGYGLPYTTGKLPYGYGPGGVAGAAGKAGYPTGTGVGPQAAAAAAAKAAAKFGAGAAGVLPGVGGAGVPGVPGAIPGIGGIAGVGTPAAAAAAAAAAKAAKYGAAAGLVPGGPGFGPGVVGVPGAGVPGVGVPGAGIPVVPGAGIPGAAVPGVVSPEAAAKAAAKAAKYGARPGVGVGGIPTYGVGAGGFPGFGVGVGGIPGVAGVPGVGGVPGVGGVPGVGISPEAQAAAAAKAAKYGVGTPAAAAAKAAAKAAQFGLVPGVGVAPGVGVAPGVGVAPGVGLAPGVGVAPGVGVAPGVGVAPGIGPGGVAAAAKSAAKVAAKAQLRAAAGLGAGIPGLGVGVGVPGLGVGAGVPGLGVGAGVPGFGAVPGALAAAKAAKYGAAVPGVLGGLGALGGVGIPGGVVGAGPAAAAAAAKAAAKAAQFGLVGAAGLGGLGVGGLGVPGVGGLGGIPPAAAAKAAKYGVAARPGFGLSPIFPGGACLGKACGRKRK

SEQ ID NO: 83 - protein, 705 aa, Homo sapiens
MAGLTAAAPRPGVLLLLLSILHPSRPGGVPGAIPGGVPGGVFYPGAGLGALGGGALGPGGKPLKPVPGGLAGAGLGAGLGAFPAVTFPGALVPGGVADAAAAYKAAKAGAGLGGVPGVGGLGVSAGAVVPQPGAGVKPGKVPGVGLPGVYPGGVLPGARFPGVGVLPGVPTGAGVKPKAPGVGGAFAGIPGVGPFGGPQPGVPLGYPIKAPKLPGGYGLPYTTGKLPYGYGPGGVAGAAGKAGYPTGTGVGPQAAAAAAAKAAAKFGAGAAGVLPGVGGAGVPGVPGAIPGIGGIAGVGTPAAAAAAAAAAKAAKYGAAAGLVPGGPGFGPGVVGVPGAGVPGVGVPGAGIPVVPGAGIPGAAVPGVVSPEAAAKAAAKAAKYGARPGVGVGGIPTYGVGAGGFPGFGVGVGGIPGVAGVPGVGGVPGVGGVPGVGISPEAQAAAAAKAAKYGLVPGVGVAPGVGVAPGVGVAPGVGLAPGVGVAPGVGVAPGVGVAPGIGPGGVAAAAKSAAKVAAKAQLRAAAGLGAGIPGLGVGVGVPGLGVGAGVPGLGVGAGVPGFGAVPGALAAAKAAKYGAAVPGVLGGLGALGGVGIPGGVVGAGPAAAAAAAKAAAKAAQFGLVGAAGLGGLGVGGLGVPGVGGLGGIPPAAAAKAAKYGAAGLGGVLGGAGQFPLGGVAARPGFGLSPIFPGGACLGKACGRKRK

SEQ ID NO: 84 - protein, 706 aa, Homo sapiens
MAGLTAAAPRPGVLLLLLSILHPSRPGGVPGAIPGGVPGGVFYPGAGLGALGGGALGPGGKPLKPVPGGLAGAGLGAGLGAFPAVTFPGALVPGGVADAAAAYKAAKAGAGLGGVPGVGGLGVSAGAVVPQPGAGVKPGKVPGVGLPGVYPGGVLPGARFPGVGVLPGVPTGAGVKPKAPGVGGAFAGIPGVGPFGGPQPGVPLGYPIKAPKLPGGYGLPYTTGKLPYGYGPGGVAGAAGKAGYPTGTGVGPQAAAAAAAKAAAKFGAGAAGVLPGVGGAGVPGVPGAIPGIGGIAGVGTPAAAAAAAAAAKAAKYGAAAGLVPGGPGFGPGVVGVPGAGVPGVGVPGAGIPVVPGAGIPGAAVPGVVSPEAAAKAAAKAAKYGARPGVGVGGIPTYGVGAGGFPGFGVGVGGIPGVAGVPGVGGVPGVGGVPGVGISPEAQAAAAAKAAKYGVGTPAAAAAKAAAKAAQFGLVPGVGVAPGVGVAPGVGVAPGVGLAPGVGVAPGVGVAPGVGVAPGIGPGGVAAAAKSAAKVAAKAQLRAAAGLGAGIPGLGVGVGVPGLGVGAGVPGLGVGAGVPGFGAVPGALAAAKAAKYGAAVPGVLGGLGALGGVGIPGGVVGAGPAAAAAAAKAAAKAAQFGLVGAAGLGGLGVGGLGVPGVGGLGGIPPAAAAKAAKYGVAARPGFGLSPIFPGGACLGKACGRKRK

SEQ ID NO: 85 - protein, 643 aa, Homo sapiens
MAGLTAAAPRPGVLLLLLSILHPSRPGGVPGAIPGGVPGGVFYPGAGLGALGGGALGPGGKPLKPGLGAFPAVTFPGALVPGGVADAAAAYKAAKAGAGLGGVPGVGGLGVSAGAVVPQPGAGVKPGKVPGVGLPGVYPGGVLPGARFPGVGVLPGVPTGAGVKPKAPGVGPFGGPQPGVPLGYPIKAPKLPGYGPGGVAGAAGKAGYPTGTGVGPQAAAAAAAKAAAKFGAGAAGVLPGVGGAGVPGVPGAIPGIGGIAGVGTPAAAAAAAAAAKAAKYGAAAGLVPGGPGFGPGVVGVPGAGVPGVGVPGAGIPVVPGAGIPGAAVPGVVSPEAAAKAAAKAAKYGARPGVGVGGIPTYGVGAGGFPGFGVGVGAEAQAAAAAKAAKYGLVPGVGVAPGVGVAPGVGVAPGVGLAPGVGVAPGVGVAPGVGVAPGIGPGGVAAAAKSAAKVAAKAQLRAAAGLGAGIPGLGVGVGVPGLGVGAGVPGLGVGAGVPGFGAVPGALAAAKAAKYGAAVPGVLGGLGALGGVGIPGGVVGAGPAAAAAAAKAAAKAAQFGLVGAAGLGGLGVGGLGVPGVGGLGGIPPAAAAKAAKYGAAGLGGVLGGAGQFPLGGVAARPGFGLSPIFPGGACLGKACGRKRK

SEQ ID NO: 86 - protein, 700 aa, Homo sapiens
MAGLTAAAPRPGVLLLLLSILHPSRPGGVPGAIPGGVPGGVFYPALGPGGKPLKPVPGGLAGAGLGAGLGAFPAVTFPGALVPGGVADAAAAYKAAKAGAGLGGVPGVGGLGVSAAPSVPGAVVPQPGAGVKPGKVPGVGLPGVYPGGVLPGARFPGVGVLPGVPTGAGVKPKAPGVGGAFAGIPGVGPFGGPQPGVPLGYPIKAPKLPGGYGLPYTTGKLPYGYGPGGVAGAAGKAGYPTGTGVGPQAAAAAAAKAAAKFGAGAAGVLPGVGGAGVPGVPGAIPGIGGIAGVGTPAAAAAAAAAAKAAKYGAAAGLVPGGPGFGPGVVGVPGAGVPGVGVPGAGIPVVPGAGIPGAAVPGVVSPEAAAKAAAKAAKYGARPGVGVGGIPTYGVGAGGFPGFGVGVGGIPGVAGVPGVGGVPGVGGVPGVGISPEAQAAAAAKAAKYGLVPGVGVAPGVGVAPGVGVAPGVGLAPGVGVAPGVGVAPGVGVAPGIGPGGVAAAAKSAAKVAAKAQLRAAAGLGAGIPGLGVGVGVPGLGVGAGVPGLGVGAGVPGFGAVPGALAAAKAAKYGAAVPGVLGGLGALGGVGIPGGVVGAGPAAAAAAAKAAAKAAQFGLVGAAGLGGLGVGGLGVPGVGGLGGIPPAAAAKAAKYGAAGLGGVLGGAGQFPLGGVAARPGFGLSPIFPGGACLGKACGRKRK

SEQ ID NO: 87 - protein, 730 aa, Homo sapiens
MAGLTAAAPRPGVLLLLLSILHPSRPGGVPGAIPGGVPGGVFYPGAGLGALGGGALGPGGKPLKPVPGGLAGAGLGAGLGAFPAVTFPGALVPGGVADAAAAYKAAKAGAGLGGVPGVGGLGVSAGAVVPQPGAGVKPGKVPGVGLPGVYPGGVLPGARFPGVGVLPGVPTGAGVKPKAPGVGGAFAGIPGVGPFGGPQPGVPLGYPIKAPKLPGGYGLPYTTGKLPYGYGPGGVAGAAGKAGYPTGTGVGPQAAAAAAAKAAAKFGAGAAGVLPGVGGAGVPGVPGAIPGIGGIAGVGTPAAAAAAAAAAKAAKYGAAAGLVPGGPGFGPGVVGVPGAGVPGVGVPGAGIPVVPGAGIPGAAVPGVVSPEAAAKAAAKAAKYGARPGVGVGGIPTYGVGAGGFPGFGVGVGGIPGVAGVPGVGGVPGVGGVPGVGISPEAQAAAAAKAAKYGVGTPAAAAAKAAAKAAQFALLNLAGLVPGVGVAPGVGVAPGVGVAPGVGLAPGVGVAPGVGVAPGVGVAPGIGPGGVAAAAKSAAKVAAKAQLRAAAGLGAGIPGLGVGVGVPGLGVGAGVPGLGVGAGVPGFGAVPGALAAAKAAKYGAAVPGVLGGLGALGGVGIPGGVVGAGPAAAAAAAKAAAKAAQFGLVGAAGLGGLGVGGLGVPGVGGLGGIPPAAAAKAAKYGAAGLGGVLGGAGQFPLGGVAARPGFGLSPIFPGGACLGKACGRKRK

SEQ ID NO: 88 - protein, 658 aa, Homo sapiens
MAGLTAAAPRPGVLLLLLSILHPSRPGGVPGAIPGGVPGGVFYPGAGLGALGGGALGPGGKPLKPVPGGLAGAGLGAGLGAFPAVTFPGALVPGGVADAAAAYKAAKAGAGLGGVPGVGGLGVSAGAVVPQPGAGVKPGKVPGVGLPGVYPGGVLPGARFPGVGVLPGVPTGAGVKPKAPGVGGAFAGIPGVGPFGGPQPGVPLGYPIKAPKLPGYGPGGVAGAAGKAGYPTGTGVGPQAAAAAAAKAAAKFGAGAAGVLPGVGGAGVPGVPGAIPGIGGIAGVGTPAAAAAAAAAAKAAKYGAAAGLVPGGPGFGPGVVGVPGAGVPGVGVPGAGIPVVPGAGIPGAAVPGVVSPEAAAKAAAKAAKYGARPGVGVGGIPTYGVGAGGFPGFGVGVGGIPGVAGVPGVGGVPGVGGVPGVGISPEAQAAAAAKAAKYGLVPGVGVAPGVGVAPGVGVAPGVGLAPGVGVAPGVGVAPGVGVAPGIGPGGVAGAAAGLGAGIPGLGVGVGVPGLGVGAGVPGLGVGAGVPGFGAVPGALAAAKAAKYGAAVPGVLGGLGALGGVGIPGGVVGAGPAAAAAAAKAAAKAAQFGLVGAAGLGGLGVGGLGVPGVGGLGGIPPAAAAKAAKYGVAARPGFGLSPIFPGGACLGKACGRKRK

SEQ ID NO: 89 - protein, 714 aa, Homo sapiens
MAGLTAAAPRPGVLLLLLSILHPSRPGGVPGAIPGGVPGGVFYPALGPGGKPLKPVPGGLAGAGLGAGLGAFPAVTFPGALVPGGVADAAAAYKAAKAGAGLGGVPGVGGLGVSAGAVVPQPGAGVKPGKVPGVGLPGVYPGGVLPGARFPGVGVLPGVPTGAGVKPKAPGVGGAFAGIPGVGPFGGPQPGVPLGYPIKAPKLPGGYGLPYTTGKLPYGYGPGGVAGAAGKAGYPTGTGVGPQAAAAAAAKAAAKFGAGAAGVLPGVGGAGVPGVPGAIPGIGGIAGVGTPAAAAAAAAAAKAAKYGAAAGLVPGGPGFGPGVVGVPGAGVPGVGVPGAGIPVVPGAGIPGAAVPGVVSPEAAAKAAAKAAKYGARPGVGVGGIPTYGVGAGGFPGFGVGVGGIPGVAGVPGVGGVPGVGGVPGVGISPEAQAAAAAKAAKYGVGTPAAAAAKAAAKAAQFGLVPGVGVAPGVGVAPGVGVAPGVGLAPGVGVAPGVGVAPGVGVAPGIGPGGVAAAAKSAAKVAAKAQLRAAAGLGAGIPGLGVGVGVPGLGVGAGVPGLGVGAGVPGFGAVPGALAAAKAAKYGAAVPGVLGGLGALGGVGIPGGVVGAGPAAAAAAAKAAAKAAQFGLVGAAGLGGLGVGGLGVPGVGGLGGIPPAAAAKAAKYGAAGLGGVLGGAGQFPLGGVAARPGFGLSPIFPGGACLGKACGRKRK

SEQ ID NO: 90 - protein, 617 aa, Homo sapiens
MAGLTAAAPRPGVLLLLLSILHPSRPGGVPGAIPGGVPGGVFYPALGPGGKPLKPVPGGLAGAGLGAGLGAFPAVTFPGALVPGGVADAAAAYKAAKAGAGLGGVPGVGGLGVSAGAVVPQPGAGVKPGKVPGVGLPGVYPGGVLPGVGPFGGPQPGVPLGYPIKAPKLPGGYGLPYTTGKLPYGYGPGGVAGAAGKAGYPTGTGVGPQAAAAAAAKAAAKFGAGAAGVLPGVGGAGVPGVPGAIPGIGGIAGVGTPAAAAAAAAAAKAAKYGAAAGLVPGGPGFGPGVVGVPGAGVPGVGVPGAGIPVVPGAGIPGAAVPGVVSPEAAAKAAAKAAKYGARPGVGVGGIPTYGVGAGGFPGFGVGVGAEAQAAAAAKAAKYGLVPGVGVAPGVGVAPGVGVAPGVGLAPGVGVAPGVGVAPGVGVAPGIGPGGVAAAAKSAAKVAAKAQLRAAAGLGAGIPGLGVGVGVPGLGVGAGVPGLGVGAGVPGFGAVPGALAAAKAAKYGAAVPGVLGGLGALGGVGIPGGVVGAGPAAAAAAAKAAAKAAQFGLVGAAGLGGLGVGGLGVPGVGGLGGIPPAAAAKAAKYGVAARPGFGLSPIFPGGACLGKACGRKRK

SEQ ID NO: 91 - protein, 786 aa, Homo sapiens
MAGLTAAAPRPGVLLLLLSILHPSRPGGVPGAIPGGVPGGVFYPGAGLGALGGGALGPGGKPLKPVPGGLAGAGLGAGLGAFPAVTFPGALVPGGVADAAAAYKAAKAGAGLGGVPGVGGLGVSAGAVVPQPGAGVKPGKVPGVGLPGVYPGGVLPGARFPGVGVLPGVPTGAGVKPKAPGVGGAFAGIPGVGPFGGPQPGVPLGYPIKAPKLPGGYGLPYTTGKLPYGYGPGGVAGAAGKAGYPTGTGVGPQAAAAAAAKAAAKFGAGAAGVLPGVGGAGVPGVPGAIPGIGGIAGVGTPAAAAAAAAAAKAAKYGAAAGLVPGGPGFGPGVVGVPGAGVPGVGVPGAGIPVVPGAGIPGAAVPGVVSPEAAAKAAAKAAKYGARPGVGVGGIPTYGVGAGGFPGFGVGVGGIPGVAGVPGVGGVPGVGGVPGVGISPEAQAAAAAKAAKYGAAGAGVLGGLVPGAPGAVPGVPGTGGVPGVGTPAAAAAKAAAKAAQFGLVPGVGVAPGVGVAPGVGVAPGVGLAPGVGVAPGVGVAPGVGVAPGIGPGGVAAAAKSAAKVAAKAQLRAAAGLGAGIPGLGVGVGVPGLGVGAGVPGLGVGAGVPGFGAGADEGVRRSLSPELREGDPSSSQHLPSTPSSPRVPGALAAAKAAKYGAAVPGVLGGLGALGGVGIPGGVVGAGPAAAAAAAKAAAKAAQFGLVGAAGLGGLGVGGLGVPGVGGLGGIPPAAAAKAAKYGAAGLGGVLGGAGQFPLGGVAARPGFGLSPIFPGGACLGKACGRKRK

SEQ ID NO: 92 - protein, 417 aa, Homo sapiens
MRFAWTVLLLGPLQLCALVHCAPPAAGQQQPPREPPAAPGAWRQQIQWENNGQVFSLLSLGSQYQPQRRRDPGAAVPGAANASAQQPRTPILLIRDNRTAAARTRTAGSSGVTAGRPRPTARHWFQAGYSTSRAREAGASRAENQTAPGEVPALSNLRPPSRVDGMVGDDPYNPYKYSDDNPYYNYYDTYERPRPGGRYRPGYGTGYFQYGLPDLVADPYYIQASTYVQKMSMYNLRCAAEENCLASTAYRADVRDYDHRVLLRFPQRVKNQGTSDFLPSRPRYSWEWHSCHQHYHSMDEFSHYDLLDANTQRRVAEGHKASFCLEDTSCDYGYHRRFACTAHTQGLSPGCYDTYGADIDCQWIDITDVKPGNYILKVSVNPSYLVPESDYTNNVVRCDIRYTGHHAYASGCTISPY

SEQ ID NO: 93 - protein, 187 aa, Homo sapiens
MSMYNLRCAAEENCLASTAYRADVRDYDHRVLLRFPQRVKNQGTSDFLPSRPRYSWEWHSCHQHYHSMDEFSHYDLLDANTQRRVAEGHKASFCLEDTSCDYGYHRRFACTAHTQGLSPGCYDTYGADIDCQWIDITDVKPGNYILKVSVNPSYLVPESDYTNNVVRCDIRYTGHHAYASGCTISPY

SEQ ID NO: 94 - protein, 1132 aa, Homo sapiens
MPRAPRCRAVRSLLRSHYREVLPLATFVRRLGPQGWRLVQRGDPAAFRALVAQCLVCVPWDARPPPAAPSFRQVSCLKELVARVLQRLCERGAKNVLAFGFALLDGARGGPPEAFTTSVRSYLPNTVTDALRGSGAWGLLLRRVGDDVLVHLLARCALFVLVAPSCAYQVCGPPLYQLGAATQARPPPHASGPRRRLGCERAWNHSVREAGVPLGLPAPGARRRGGSASRSLPLPKRPRRGAAPEPERTPVGQGSWAHPGRTRGPSDRGFCVVSPARPAEEATSLEGALSGTRHSHPSVGRQHHAGPPSTSRPPRPWDTPCPPVYAETKHFLYSSGDKEQLRPSFLLSSLRPSLTGARRLVETIFLGSRPWMPGTPRRLPRLPQRYWQMRPLFLELLGNHAQCPYGVLLKTHCPLRAAVTPAAGVCAREKPQGSVAAPEEEDTDPRRLVQLLRQHSSPWQVYGFVRACLRRLVPPGLWGSRHNERRFLRNTKKFISLGKHAKLSLQELTWKMSVRDCAWLRRSPGVGCVPAAEHRLREEILAKFLHWLMSVYVVELLRSFFYVTETTFQKNRLFFYRKSVWSKLQSIGIRQHLKRVQLRELSEAEVRQHREARPALLTSRLRFIPKPDGLRPIVNMDYVVGARTFRREKRAERLTSRVKALFSVLNYERARRPGLLGASVLGLDDIHRAWRTFVLRVRAQDPPPELYFVKVDVTGAYDTIPQDRLTEVIASIIKPQNTYCVRRYAVVQKAAHGHVRKAFKSHVSTLTDLQPYMRQFVAHLQETSPLRDAVVIEQSSSLNEASSGLFDVFLRFMCHHAVRIRGKSYVQCQGIPQGSILSTLLCSLCYGDMENKLFAGIRRDGLLLRLVDDFLLVTPHLTHAKTFLRTLVRGVPEYGCVVNLRKTVVNFPVEDEALGGTAFVQMPAHGLFPWCGLLLDTRTLEVQSDYSSYARTSIRASLTFNRGFKAGRNMRRKLFGVLRLKCHSLFLDLQVNSLQTVCTNIYKILLLQAYRFHACVLQLPFHQQVWKNPTFFLRVISDTASLCYSILKAKNAGMSLGAKGAAGPLPSEAVQWLCHQAFLLKLTRHRVTYVPLLGSLRTAQTQLSRKLPGTTLTALEAAANPALPSDFKTILD

SEQ ID NO: 95 - protein, 1069 aa, Homo sapiens
MPRAPRCRAVRSLLRSHYREVLPLATFVRRLGPQGWRLVQRGDPAAFRALVAQCLVCVPWDARPPPAAPSFRQVSCLKELVARVLQRLCERGAKNVLAFGFALLDGARGGPPEAFTTSVRSYLPNTVTDALRGSGAWGLLLRRVGDDVLVHLLARCALFVLVAPSCAYQVCGPPLYQLGAATQARPPPHASGPRRRLGCERAWNHSVREAGVPLGLPAPGARRRGGSASRSLPLPKRPRRGAAPEPERTPVGQGSWAHPGRTRGPSDRGFCVVSPARPAEEATSLEGALSGTRHSHPSVGRQHHAGPPSTSRPPRPWDTPCPPVYAETKHFLYSSGDKEQLRPSFLLSSLRPSLTGARRLVETIFLGSRPWMPGTPRRLPRLPQRYWQMRPLFLELLGNHAQCPYGVLLKTHCPLRAAVTPAAGVCAREKPQGSVAAPEEEDTDPRRLVQLLRQHSSPWQVYGFVRACLRRLVPPGLWGSRHNERRFLRNTKKFISLGKHAKLSLQELTWKMSVRDCAWLRRSPGVGCVPAAEHRLREEILAKFLHWLMSVYVVELLRSFFYVTETTFQKNRLFFYRKSVWSKLQSIGIRQHLKRVQLRELSEAEVRQHREARPALLTSRLRFIPKPDGLRPIVNMDYVVGARTFRREKRAERLTSRVKALFSVLNYERARRPGLLGASVLGLDDIHRAWRTFVLRVRAQDPPPELYFVKVDVTGAYDTIPQDRLTEVIASIIKPQNTYCVRRYAVVQKAAHGHVRKAFKSHVSTLTDLQPYMRQFVAHLQETSPLRDAVVIEQSSSLNEASSGLFDVFLRFMCHHAVRIRGKSYVQCQGIPQGSILSTLLCSLCYGDMENKLFAGIRRDGLLLRLVDDFLLVTPHLTHAKTFLSYARTSIRASLTFNRGFKAGRNMRRKLFGVLRLKCHSLFLDLQVNSLQTVCTNIYKILLLQAYRFHACVLQLPFHQQVWKNPTFFLRVISDTASLCYSILKAKNAGMSLGAKGAAGPLPSEAVQWLCHQAFLLKLTRHRVTYVPLLGSLRTAQTQLSRKLPGTTLTALEAAANPALPSDFKTILD

SEQ ID NO: 96 - protein, 2477 aa, Homo sapiens
MLRGPGPGLLLLAVQCLGTAVPSTGASKSKRQAQQMVQPQSPVAVSQSKPGCYDNGKHYQINQQWERTYLGNALVCTCYGGSRGFNCESKPEAEETCFDKYTGNTYRVGDTYERPKDSMIWDCTCIGAGRGRISCTIANRCHEGGQSYKIGDTWRRPHETGGYMLECVCLGNGKGEWTCKPIAEKCFDHAAGTSYVVGETWEKPYQGWMMVDCTCLGEGSGRITCTSRNRCNDQDTRTSYRIGDTWSKKDNRGNLLQCICTGNGRGEWKCERHTSVQTTSSGSGPFTDVRAAVYQPQPHPQPPPYGHCVTDSGVVYSVGMQWLKTQGNKQMLCTCLGNGVSCQETAVTQTYGGNSNGEPCVLPFTYNGRTFYSCTTEGRQDGHLWCSTTSNYEQDQKYSFCTDHTVLVQTRGGNSNGALCHFPFLYNNHNYTDCTSEGRRDNMKWCGTTQNYDADQKFGFCPMAAHEEICTTNEGVMYRIGDQWDKQHDMGHMMRCTCVGNGRGEWTCIAYSQLRDQCIVDDITYNVNDTFHKRHEEGHMLNCTCFGQGRGRWKCDPVDQCQDSETGTFYQIGDSWEKYVHGVRYQCYCYGRGIGEWHCQPLQTYPSSSGPVEVFITETPSQPNSHPIQWNAPQPSHISKYILRWRPKNSVGRWKEATIPGHLNSYTIKGLKPGVVYEGQLISIQQYGHQEVTRFDFTTTSTSTPVTSNTVTGETTPFSPLVATSESVTEITASSFVVSWVSASDTVSGFRVEYELSEEGDEPQYLDLPSTATSVNIPDLLPGRKYIVNVYQISEDGEQSLILSTSQTTAPDAPPDPTVDQVDDTSIVVRWSRPQAPITGYRIVYSPSVEGSSTELNLPETANSVTLSDLQPGVQYNITIYAVEENQESTPVVIQQETTGTPRSDTVPSPRDLQFVEVTDVKVTIMWTPPESAVTGYRVDVIPVNLPGEHGQRLPISRNTFAEVTGLSPGVTYYFKVFAVSHGRESKPLTAQQTTKLDAPTNLQFVNETDSTVLVRWTPPRAQITGYRLTVGLTRRGQPRQYNVGPSVSKYPLRNLQPASEYTVSLVAIKGNQESPKATGVFTTLQPGSSIPPYNTEVTETTIVITWTPAPRIGFKLGVRPSQGGEAPREVTSDSGSIVVSGLTPGVEYVYTIQVLRDGQERDAPIVNKVVTPLSPPTNLHLEANPDTGVLTVSWERSTTPDITGYRITTTPTNGQQGNSLEEVVHADQSSCTFDNLSPGLEYNVSVYTVKDDKESVPISDTIIPEVPQLTDLSFVDITDSSIGLRWTPLNSSTIIGYRITVVAAGEGIPIFEDFVDSSVGYYTVTGLEPGIDYDISVITLINGGESAPTTLTQQTAVPPPTDLRFTNIGPDTMRVTWAPPPSIDLTNFLVRYSPVKNEEDVAELSISPSDNAVVLTNLLPGTEYVVSVSSVYEQHESTPLRGRQKTGLDSPTGIDFSDITANSFTVHWIAPRATITGYRIRHHPEHFSGRPREDRVPHSRNSITLTNLTPGTEYVVSIVALNGREESPLLIGQQSTVSDVPRDLEVVAATPTSLLISWDAPAVTVRYYRITYGETGGNSPVQEFTVPGSKSTATISGLKPGVDYTITVYAVTGRGDSPASSKPISINYRTEIDKPSQMQVTDVQDNSISVKWLPSSSPVTGYRVTTTPKNGPGPTKTKTAGPDQTEMTIEGLQPTVEYVVSVYAQNPSGESQPLVQTAVTNIDRPKGLAFTDVDVDSIKIAWESPQGQVSRYRVTYSSPEDGIHELFPAPDGEEDTAELQGLRPGSEYTVSVVALHDDMESQPLIGTQSTAIPAPTDLKFTQVTPTSLSAQWTPPNVQLTGYRVRVTPKEKTGPMKEINLAPDSSSVVVSGLMVATKYEVSVYALKDTLTSRPAQGVVTTLENVSPPRRARVTDATETTITISWRTKTETITGFQVDAVPANGQTPIQRTIKPDVRSYTITGLQPGTDYKIYLYTLNDNARSSPVVIDASTAIDAPSNLRFLATTPNSLLVSWQPPRARITGYIIKYEKPGSPPREVVPRPRPGVTEATITGLEPGTEYTIYVIALKNNQKSEPLIGRKKTDELPQLVTLPHPNLHGPEILDVPSTVQKTPFVTHPGYDTGNGIQLPGTSGQQPSVGQQMIFEEHGFRRTTPPTTATPIRHRPRPYPPNVGEEIQIGHIPREDVDYHLYPHGPGLNPNASTGQEALSQTTISWAPFQDTSEYIISCHPVGTDEEPLQFRVPGTSTSATLTGLTRGATYNIIVEALKDQQRHKVREEVVTVGNSVNEGLNQPTDDSCFDPYTVSHYAVGDEWERMSESGFKLLCQCLGFGSGHFRCDSSRWCHDNGVNYKIGEKWDRQGENGQMMSCTCLGNGKGEFKCDPHEATCYDDGKTYHVGEQWQKEYLGAICSCTCFGGQRGWRCDNCRRPGGEPSPEGTTGQSYNQYSQRYHQRTNTNVNCPIECFMPLDVQADREDSRE

SEQ ID NO: 97 - protein, 2355 aa, Homo sapiens
MLRGPGPGLLLLAVQCLGTAVPSTGASKSKRQAQQMVQPQSPVAVSQSKPGCYDNGKHYQINQQWERTYLGNALVCTCYGGSRGFNCESKPEAEETCFDKYTGNTYRVGDTYERPKDSMIWDCTCIGAGRGRISCTIANRCHEGGQSYKIGDTWRRPHETGGYMLECVCLGNGKGEWTCKPIAEKCFDHAAGTSYVVGETWEKPYQGWMMVDCTCLGEGSGRITCTSRNRCNDQDTRTSYRIGDTWSKKDNRGNLLQCICTGNGRGEWKCERHTSVQTTSSGSGPFTDVRAAVYQPQPHPQPPPYGHCVTDSGVVYSVGMQWLKTQGNKQMLCTCLGNGVSCQETAVTQTYGGNSNGEPCVLPFTYNGRTFYSCTTEGRQDGHLWCSTTSNYEQDQKYSFCTDHTVLVQTRGGNSNGALCHFPFLYNNHNYTDCTSEGRRDNMKWCGTTQNYDADQKFGFCPMAAHEEICTTNEGVMYRIGDQWDKQHDMGHMMRCTCVGNGRGEWTCIAYSQLRDQCIVDDITYNVNDTFHKRHEEGHMLNCTCFGQGRGRWKCDPVDQCQDSETGTFYQIGDSWEKYVHGVRYQCYCYGRGIGEWHCQPLQTYPSSSGPVEVFITETPSQPNSHPIQWNAPQPSHISKYILRWRPKNSVGRWKEATIPGHLNSYTIKGLKPGVVYEGQLISIQQYGHQEVTRFDFTTTSTSTPVTSNTVTGETTPFSPLVATSESVTEITASSFVVSWVSASDTVSGFRVEYELSEEGDEPQYLDLPSTATSVNIPDLLPGRKYIVNVYQISEDGEQSLILSTSQTTAPDAPPDPTVDQVDDTSIVVRWSRPQAPITGYRIVYSPSVEGSSTELNLPETANSVTLSDLQPGVQYNITIYAVEENQESTPVVIQQETTGTPRSDTVPSPRDLQFVEVTDVKVTIMWTPPESAVTGYRVDVIPVNLPGEHGQRLPISRNTFAEVTGLSPGVTYYFKVFAVSHGRESKPLTAQQTTKLDAPTNLQFVNETDSTVLVRWTPPRAQITGYRLTVGLTRRGQPRQYNVGPSVSKYPLRNLQPASEYTVSLVAIKGNQESPKATGVFTTLQPGSSIPPYNTEVTETTIVITWTPAPRIGFKLGVRPSQGGEAPREVTSDSGSIVVSGLTPGVEYVYTIQVLRDGQERDAPIVNKVVTPLSPPTNLHLEANPDTGVLTVSWERSTTPDITGYRITTTPTNGQQGNSLEEVVHADQSSCTFDNLSPGLEYNVSVYTVKDDKESVPISDTIIPAVPPPTDLRFTNIGPDTMRVTWAPPPSIDLTNFLVRYSPVKNEEDVAELSISPSDNAVVLTNLLPGTEYVVSVSSVYEQHESTPLRGRQKTGLDSPTGIDFSDITANSFTVHWIAPRATITGYRIRHHPEHFSGRPREDRVPHSRNSITLTNLTPGTEYVVSIVALNGREESPLLIGQQSTVSDVPRDLEVVAATPTSLLISWDAPAVTVRYYRITYGETGGNSPVQEFTVPGSKSTATISGLKPGVDYTITVYAVTGRGDSPASSKPISINYRTEIDKPSQMQVTDVQDNSISVKWLPSSSPVTGYRVTTTPKNGPGPTKTKTAGPDQTEMTIEGLQPTVEYVVSVYAQNPSGESQPLVQTAVTNIDRPKGLAFTDVDVDSIKIAWESPQGQVSRYRVTYSSPEDGIHELFPAPDGEEDTAELQGLRPGSEYTVSVVALHDDMESQPLIGTQSTAIPAPTDLKFTQVTPTSLSAQWTPPNVQLTGYRVRVTPKEKTGPMKEINLAPDSSSVVVSGLMVATKYEVSVYALKDTLTSRPAQGVVTTLENVSPPRRARVTDATETTITISWRTKTETITGFQVDAVPANGQTPIQRTIKPDVRSYTITGLQPGTDYKIYLYTLNDNARSSPVVIDASTAIDAPSNLRFLATTPNSLLVSWQPPRARITGYIIKYEKPGSPPREVVPRPRPGVTEATITGLEPGTEYTIYVIALKNNQKSEPLIGRKKTDELPQLVTLPHPNLHGPEILDVPSTVQKTPFVTHPGYDTGNGIQLPGTSGQQPSVGQQMIFEEHGFRRTTPPTTATPIRHRPRPYPPNVGQEALSQTTISWAPFQDTSEYIISCHPVGTDEEPLQFRVPGTSTSATLTGLTRGATYNIIVEALKDQQRHKVREEVVTVGNSVNEGLNQPTDDSCFDPYTVSHYAVGDEWERMSESGFKLLCQCLGFGSGHFRCDSSRWCHDNGVNYKIGEKWDRQGENGQMMSCTCLGNGKGEFKCDPHEATCYDDGKTYHVGEQWQKEYLGAICSCTCFGGQRGWRCDNCRRPGGEPSPEGTTGQSYNQYSQRYHQRTNTNVNCPIECFMPLDVQADREDSRE

SEQ ID NO: 98 - protein, 2330 aa, Homo sapiens
MLRGPGPGLLLLAVQCLGTAVPSTGASKSKRQAQQMVQPQSPVAVSQSKPGCYDNGKHYQINQQWERTYLGNALVCTCYGGSRGFNCESKPEAEETCFDKYTGNTYRVGDTYERPKDSMIWDCTCIGAGRGRISCTIANRCHEGGQSYKIGDTWRRPHETGGYMLECVCLGNGKGEWTCKPIAEKCFDHAAGTSYVVGETWEKPYQGWMMVDCTCLGEGSGRITCTSRNRCNDQDTRTSYRIGDTWSKKDNRGNLLQCICTGNGRGEWKCERHTSVQTTSSGSGPFTDVRAAVYQPQPHPQPPPYGHCVTDSGVVYSVGMQWLKTQGNKQMLCTCLGNGVSCQETAVTQTYGGNSNGEPCVLPFTYNGRTFYSCTTEGRQDGHLWCSTTSNYEQDQKYSFCTDHTVLVQTRGGNSNGALCHFPFLYNNHNYTDCTSEGRRDNMKWCGTTQNYDADQKFGFCPMAAHEEICTTNEGVMYRIGDQWDKQHDMGHMMRCTCVGNGRGEWTCIAYSQLRDQCIVDDITYNVNDTFHKRHEEGHMLNCTCFGQGRGRWKCDPVDQCQDSETGTFYQIGDSWEKYVHGVRYQCYCYGRGIGEWHCQPLQTYPSSSGPVEVFITETPSQPNSHPIQWNAPQPSHISKYILRWRPKNSVGRWKEATIPGHLNSYTIKGLKPGVVYEGQLISIQQYGHQEVTRFDFTTTSTSTPVTSNTVTGETTPFSPLVATSESVTEITASSFVVSWVSASDTVSGFRVEYELSEEGDEPQYLDLPSTATSVNIPDLLPGRKYIVNVYQISEDGEQSLILSTSQTTAPDAPPDPTVDQVDDTSIVVRWSRPQAPITGYRIVYSPSVEGSSTELNLPETANSVTLSDLQPGVQYNITIYAVEENQESTPVVIQQETTGTPRSDTVPSPRDLQFVEVTDVKVTIMWTPPESAVTGYRVDVIPVNLPGEHGQRLPISRNTFAEVTGLSPGVTYYFKVFAVSHGRESKPLTAQQTTKLDAPTNLQFVNETDSTVLVRWTPPRAQITGYRLTVGLTRRGQPRQYNVGPSVSKYPLRNLQPASEYTVSLVAIKGNQESPKATGVFTTLQPGSSIPPYNTEVTETTIVITWTPAPRIGFKLGVRPSQGGEAPREVTSDSGSIVVSGLTPGVEYVYTIQVLRDGQERDAPIVNKVVTPLSPPTNLHLEANPDTGVLTVSWERSTTPDITGYRITTTPTNGQQGNSLEEVVHADQSSCTFDNLSPGLEYNVSVYTVKDDKESVPISDTIIPAVPPPTDLRFTNIGPDTMRVTWAPPPSIDLTNFLVRYSPVKNEEDVAELSISPSDNAVVLTNLLPGTEYVVSVSSVYEQHESTPLRGRQKTGLDSPTGIDFSDITANSFTVHWIAPRATITGYRIRHHPEHFSGRPREDRVPHSRNSITLTNLTPGTEYVVSIVALNGREESPLLIGQQSTVSDVPRDLEVVAATPTSLLISWDAPAVTVRYYRITYGETGGNSPVQEFTVPGSKSTATISGLKPGVDYTITVYAVTGRGDSPASSKPISINYRTEIDKPSQMQVTDVQDNSISVKWLPSSSPVTGYRVTTTPKNGPGPTKTKTAGPDQTEMTIEGLQPTVEYVVSVYAQNPSGESQPLVQTAVTNIDRPKGLAFTDVDVDSIKIAWESPQGQVSRYRVTYSSPEDGIHELFPAPDGEEDTAELQGLRPGSEYTVSVVALHDDMESQPLIGTQSTAIPAPTDLKFTQVTPTSLSAQWTPPNVQLTGYRVRVTPKEKTGPMKEINLAPDSSSVVVSGLMVATKYEVSVYALKDTLTSRPAQGVVTTLENVSPPRRARVTDATETTITISWRTKTETITGFQVDAVPANGQTPIQRTIKPDVRSYTITGLQPGTDYKIYLYTLNDNARSSPVVIDASTAIDAPSNLRFLATTPNSLLVSWQPPRARITGYIIKYEKPGSPPREVVPRPRPGVTEATITGLEPGTEYTIYVIALKNNQKSEPLIGRKKTVQKTPFVTHPGYDTGNGIQLPGTSGQQPSVGQQMIFEEHGFRRTTPPTTATPIRHRPRPYPPNVGQEALSQTTISWAPFQDTSEYIISCHPVGTDEEPLQFRVPGTSTSATLTGLTRGATYNIIVEALKDQQRHKVREEVVTVGNSVNEGLNQPTDDSCFDPYTVSHYAVGDEWERMSESGFKLLCQCLGFGSGHFRCDSSRWCHDNGVNYKIGEKWDRQGENGQMMSCTCLGNGKGEFKCDPHEATCYDDGKTYHVGEQWQKEYLGAICSCTCFGGQRGWRCDNCRRPGGEPSPEGTTGQSYNQYSQRYHQRTNTNVNCPIECFMPLDVQADREDSRE

SEQ ID NO: 99 - protein, 2296 aa, Homo sapiens
MLRGPGPGLLLLAVQCLGTAVPSTGASKSKRQAQQMVQPQSPVAVSQSKPGCYDNGKHYQINQQWERTYLGNALVCTCYGGSRGFNCESKPEAEETCFDKYTGNTYRVGDTYERPKDSMIWDCTCIGAGRGRISCTIANRCHEGGQSYKIGDTWRRPHETGGYMLECVCLGNGKGEWTCKPIAEKCFDHAAGTSYVVGETWEKPYQGWMMVDCTCLGEGSGRITCTSRNRCNDQDTRTSYRIGDTWSKKDNRGNLLQCICTGNGRGEWKCERHTSVQTTSSGSGPFTDVRAAVYQPQPHPQPPPYGHCVTDSGVVYSVGMQWLKTQGNKQMLCTCLGNGVSCQETAVTQTYGGNSNGEPCVLPFTYNGRTFYSCTTEGRQDGHLWCSTTSNYEQDQKYSFCTDHTVLVQTRGGNSNGALCHFPFLYNNHNYTDCTSEGRRDNMKWCGTTQNYDADQKFGFCPMAAHEEICTTNEGVMYRIGDQWDKQHDMGHMMRCTCVGNGRGEWTCIAYSQLRDQCIVDDITYNVNDTFHKRHEEGHMLNCTCFGQGRGRWKCDPVDQCQDSETGTFYQIGDSWEKYVHGVRYQCYCYGRGIGEWHCQPLQTYPSSSGPVEVFITETPSQPNSHPIQWNAPQPSHISKYILRWRPKNSVGRWKEATIPGHLNSYTIKGLKPGVVYEGQLISIQQYGHQEVTRFDFTTTSTSTPVTSNTVTGETTPFSPLVATSESVTEITASSFVVSWVSASDTVSGFRVEYELSEEGDEPQYLDLPSTATSVNIPDLLPGRKYIVNVYQISEDGEQSLILSTSQTTAPDAPPDPTVDQVDDTSIVVRWSRPQAPITGYRIVYSPSVEGSSTELNLPETANSVTLSDLQPGVQYNITIYAVEENQESTPVVIQQETTGTPRSDTVPSPRDLQFVEVTDVKVTIMWTPPESAVTGYRVDVIPVNLPGEHGQRLPISRNTFAEVTGLSPGVTYYFKVFAVSHGRESKPLTAQQTTKLDAPTNLQFVNETDSTVLVRWTPPRAQITGYRLTVGLTRRGQPRQYNVGPSVSKYPLRNLQPASEYTVSLVAIKGNQESPKATGVFTTLQPGSSIPPYNTEVTETTIVITWTPAPRIGFKLGVRPSQGGEAPREVTSDSGSIVVSGLTPGVEYVYTIQVLRDGQERDAPIVNKVVTPLSPPTNLHLEANPDTGVLTVSWERSTTPDITGYRITTTPTNGQQGNSLEEVVHADQSSCTFDNLSPGLEYNVSVYTVKDDKESVPISDTIIPAVPPPTDLRFTNIGPDTMRVTWAPPPSIDLTNFLVRYSPVKNEEDVAELSISPSDNAVVLTNLLPGTEYVVSVSSVYEQHESTPLRGRQKTGLDSPTGIDFSDITANSFTVHWIAPRATITGYRIRHHPEHFSGRPREDRVPHSRNSITLTNLTPGTEYVVSIVALNGREESPLLIGQQSTVSDVPRDLEVVAATPTSLLISWDAPAVTVRYYRITYGETGGNSPVQEFTVPGSKSTATISGLKPGVDYTITVYAVTGRGDSPASSKPISINYRTEIDKPSQMQVTDVQDNSISVKWLPSSSPVTGYRVTTTPKNGPGPTKTKTAGPDQTEMTIEGLQPTVEYVVSVYAQNPSGESQPLVQTAVTTIPAPTDLKFTQVTPTSLSAQWTPPNVQLTGYRVRVTPKEKTGPMKEINLAPDSSSVVVSGLMVATKYEVSVYALKDTLTSRPAQGVVTTLENVSPPRRARVTDATETTITISWRTKTETITGFQVDAVPANGQTPIQRTIKPDVRSYTITGLQPGTDYKIYLYTLNDNARSSPVVIDASTAIDAPSNLRFLATTPNSLLVSWQPPRARITGYIIKYEKPGSPPREVVPRPRPGVTEATITGLEPGTEYTIYVIALKNNQKSEPLIGRKKTDELPQLVTLPHPNLHGPEILDVPSTVQKTPFVTHPGYDTGNGIQLPGTSGQQPSVGQQMIFEEHGFRRTTPPTTATPIRHRPRPYPPNVGEEIQIGHIPREDVDYHLYPHGPGLNPNASTGQEALSQTTISWAPFQDTSEYIISCHPVGTDEEPLQFRVPGTSTSATLTGLTRGATYNIIVEALKDQQRHKVREEVVTVGNSVNEGLNQPTDDSCFDPYTVSHYAVGDEWERMSESGFKLLCQCLGFGSGHFRCDSSRWCHDNGVNYKIGEKWDRQGENGQMMSCTCLGNGKGEFKCDPHEATCYDDGKTYHVGEQWQKEYLGAICSCTCFGGQRGWRCDNCRRPGGEPSPEGTTGQSYNQYSQRYHQRTNTNVNCPIECFMPLDVQADREDSRE

SEQ ID NO: 100 - protein, 2176 aa, Homo sapiens
MLRGPGPGLLLLAVQCLGTAVPSTGASKSKRQAQQMVQPQSPVAVSQSKPGCYDNGKHYQINQQWERTYLGNALVCTCYGGSRGFNCESKPEAEETCFDKYTGNTYRVGDTYERPKDSMIWDCTCIGAGRGRISCTIANRCHEGGQSYKIGDTWRRPHETGGYMLECVCLGNGKGEWTCKPIAEKCFDHAAGTSYVVGETWEKPYQGWMMVDCTCLGEGSGRITCTSRNRCNDQDTRTSYRIGDTWSKKDNRGNLLQCICTGNGRGEWKCERHTSVQTTSSGSGPFTDVRAAVYQPQPHPQPPPYGHCVTDSGVVYSVGMQWLKTQGNKQMLCTCLGNGVSCQETAVTQTYGGNSNGEPCVLPFTYNGRTFYSCTTEGRQDGHLWCSTTSNYEQDQKYSFCTDHTVLVQTRGGNSNGALCHFPFLYNNHNYTDCTSEGRRDNMKWCGTTQNYDADQKFGFCPMAAHEEICTTNEGVMYRIGDQWDKQHDMGHMMRCTCVGNGRGEWTCIAYSQLRDQCIVDDITYNVNDTFHKRHEEGHMLNCTCFGQGRGRWKCDPVDQCQDSETGTFYQIGDSWEKYVHGVRYQCYCYGRGIGEWHCQPLQTYPSSSGPVEVFITETPSQPNSHPIQWNAPQPSHISKYILRWRPKNSVGRWKEATIPGHLNSYTIKGLKPGVVYEGQLISIQQYGHQEVTRFDFTTTSTSTPVTSNTVTGETTPFSPLVATSESVTEITASSFVVSWVSASDTVSGFRVEYELSEEGDEPQYLDLPSTATSVNIPDLLPGRKYIVNVYQISEDGEQSLILSTSQTTAPDAPPDPTVDQVDDTSIVVRWSRPQAPITGYRIVYSPSVEGSSTELNLPETANSVTLSDLQPGVQYNITIYAVEENQESTPVVIQQETTGTPRSDTVPSPRDLQFVEVTDVKVTIMWTPPESAVTGYRVDVIPVNLPGEHGQRLPISRNTFAEVTGLSPGVTYYFKVFAVSHGRESKPLTAQQTTKLDAPTNLQFVNETDSTVLVRWTPPRAQITGYRLTVGLTRRGQPRQYNVGPSVSKYPLRNLQPASEYTVSLVAIKGNQESPKATGVFTTLQPGSSIPPYNTEVTETTIVITWTPAPRIGFKLGVRPSQGGEAPREVTSDSGSIVVSGLTPGVEYVYTIQVLRDGQERDAPIVNKVVTPLSPPTNLHLEANPDTGVLTVSWERSTTPDITGYRITTTPTNGQQGNSLEEVVHADQSSCTFDNLSPGLEYNVSVYTVKDDKESVPISDTIIPAVPPPTDLRFTNIGPDTMRVTWAPPPSIDLTNFLVRYSPVKNEEDVAELSISPSDNAVVLTNLLPGTEYVVSVSSVYEQHESTPLRGRQKTGLDSPTGIDFSDITANSFTVHWIAPRATITGYRIRHHPEHFSGRPREDRVPHSRNSITLTNLTPGTEYVVSIVALNGREESPLLIGQQSTVSDVPRDLEVVAATPTSLLISWDAPAVTVRYYRITYGETGGNSPVQEFTVPGSKSTATISGLKPGVDYTITVYAVTGRGDSPASSKPISINYRTEIDKPSQMQVTDVQDNSISVKWLPSSSPVTGYRVTTTPKNGPGPTKTKTAGPDQTEMTIEGLQPTVEYVVSVYAQNPSGESQPLVQTAVTTIPAPTDLKFTQVTPTSLSAQWTPPNVQLTGYRVRVTPKEKTGPMKEINLAPDSSSVVVSGLMVATKYEVSVYALKDTLTSRPAQGVVTTLENVSPPRRARVTDATETTITISWRTKTETITGFQVDAVPANGQTPIQRTIKPDVRSYTITGLQPGTDYKIYLYTLNDNARSSPVVIDASTAIDAPSNLRFLATTPNSLLVSWQPPRARITGYIIKYEKPGSPPREVVPRPRPGVTEATITGLEPGTEYTIYVIALKNNQKSEPLIGRKKTGQEALSQTTISWAPFQDTSEYIISCHPVGTDEEPLQFRVPGTSTSATLTGLTRGATYNIIVEALKDQQRHKVREEVVTVGNSVNEGLNQPTDDSCFDPYTVSHYAVGDEWERMSESGFKLLCQCLGFGSGHFRCDSSRWCHDNGVNYKIGEKWDRQGENGQMMSCTCLGNGKGEFKCDPHEATCYDDGKTYHVGEQWQKEYLGAICSCTCFGGQRGWRCDNCRRPGGEPSPEGTTGQSYNQYSQRYHQRTNTNVNCPIECFMPLDVQADREDSRE

SEQ ID NO: 101 - protein, 657 aa, Homo sapiens
MLRGPGPGLLLLAVQCLGTAVPSTGASKSKRQAQQMVQPQSPVAVSQSKPGCYDNGKHYQINQQWERTYLGNALVCTCYGGSRGFNCESKPEAEETCFDKYTGNTYRVGDTYERPKDSMIWDCTCIGAGRGRISCTIANRCHEGGQSYKIGDTWRRPHETGGYMLECVCLGNGKGEWTCKPIAEKCFDHAAGTSYVVGETWEKPYQGWMMVDCTCLGEGSGRITCTSRNRCNDQDTRTSYRIGDTWSKKDNRGNLLQCICTGNGRGEWKCERHTSVQTTSSGSGPFTDVRAAVYQPQPHPQPPPYGHCVTDSGVVYSVGMQWLKTQGNKQMLCTCLGNGVSCQETAVTQTYGGNSNGEPCVLPFTYNGRTFYSCTTEGRQDGHLWCSTTSNYEQDQKYSFCTDHTVLVQTRGGNSNGALCHFPFLYNNHNYTDCTSEGRRDNMKWCGTTQNYDADQKFGFCPMAAHEEICTTNEGVMYRIGDQWDKQHDMGHMMRCTCVGNGRGEWTCIAYSQLRDQCIVDDITYNVNDTFHKRHEEGHMLNCTCFGQGRGRWKCDPVDQCQDSETGTFYQIGDSWEKYVHGVRYQCYCYGRGIGEWHCQPLQTYPSSSGPVEVFITETPSQPNSHPIQWNAPQPSHISKYILRWRPVSIPPRNLGY

SEQ ID NO: 102 - protein, 478 aa, Homo sapiens
MAPLRPLLILALLAWVALADQESCKGRCTEGFNVDKKCQCDELCSYYQSCCTDYTAECKPQVTRGDVFTMPEDEYTVYDDGEEKNNATVHEQVGGPSLTSDLQAQSKGNPEQTPVLKPEEEAPAPEVGASKPEGIDSRPETLHPGRPQPPAEEELCSGKPFDAFTDLKNGSLFAFRGQYCYELDEKAVRPGYPKLIRDVWGIEGPIDAAFTRINCQGKTYLFKGSQYWRFEDGVLDPDYPRNISDGFDGIPDNVDAALALPAHSYSGRERVYFFKGKQYWEYQFQHQPSQEECEGSSLSAVFEHFAMMQRDSWEDIFELLFWGRTSAGTRQPQFISRDWHGVPGQVDAAMAGRIYISGMAPRPSLAKKQRFRHRNRKGYRSQRGHSRGRNQNSRRPSRATWLSLFSSEESNLGANNYDDYRMDWLVPATCEPIQSVFFFSGDKYYRVNLRTRRVDTVDPPYPRSIAQYWLGCPAPGHL

SEQ ID NO: 103 - protein, 1247 aa, Homo sapiens
MLASSSRIRAAWTRALLLPLLLAGPVGCLSRQELFPFGPGQGDLELEDGDDFVSPALELSGALRFYDRSDIDAVYVTTNGIIATSEPPAKESHPGLFPPTFGAVAPFLADLDTTDGLGKVYYREDLSPSITQRAAECVHRGFPEISFQPSSAVVVTWESVAPYQGPSRDPDQKGKRNTFQAVLASSDSSSYAIFLYPEDGLQFHTTFSKKENNQVPAVVAFSQGSVGFLWKSNGAYNIFANDRESVENLAKSSNSGQQGVWVFEIGSPATTNGVVPADVILGTEDGAEYDDEDEDYDLATTRLGLEDVGTTPFSYKALRRGGADTYSVPSVLSPRRAATERPLGPPTERTRSFQLAVETFHQQHPQVIDVDEVEETGVVFSYNTDSRQTCANNRHQCSVHAECRDYATGFCCSCVAGYTGNGRQCVAEGSPQRVNGKVKGRIFVGSSQVPIVFENTDLHSYVVMNHGRSYTAISTIPETVGYSLLPLAPVGGIIGWMFAVEQDGFKNGFSITGGEFTRQAEVTFVGHPGNLVIKQRFSGIDEHGHLTIDTELEGRVPQIPFGSSVHIEPYTELYHYSTSVITSSSTREYTVTEPERDGASPSRIYTYQWRQTITFQECVHDDSRPALPSTQQLSVDSVFVLYNQEEKILRYALSNSIGPVREGSPDALQNPCYIGTHGCDTNAACRPGPRTQFTCECSIGFRGDGRTCYDIDECSEQPSVCGSHTICNNHPGTFRCECVEGYQFSDEGTCVAVVDQRPINYCETGLHNCDIPQRAQCIYTGGSSYTCSCLPGFSGDGQACQDVDECQPSRCHPDAFCYNTPGSFTCQCKPGYQGDGFRCVPGEVEKTRCQHEREHILGAAGATDPQRPIPPGLFVPECDAHGHYAPTQCHGSTGYCWCVDRDGREVEGTRTRPGMTPPCLSTVAPPIHQGPAVPTAVIPLPPGTHLLFAQTGKIERLPLEGNTMRKTEAKAFLHVPAKVIIGLAFDCVDKMVYWTDITEPSIGRASLHGGEPTTIIRQDLGSPEGIAVDHLGRNIFWTDSNLDRIEVAKLDGTQRRVLFETDLVNPRGIVTDSVRGNLYWTDWNRDNPKIETSYMDGTNRRILVQDDLGLPNGLTFDAFSSQLCWVDAGTNRAECLNPSQPSRRKALEGLQYPFAVTSYGKNLYFTDWKMNSVVALDLAISKETDAFQPHKQTRLYGITTALSQCPQGHNYCSVNNGGCTHLCLATPGSRTCRCPDNTLGVDCIEQK

SEQ ID NO: 104 - protein, 3075 aa, Homo sapiens
MRGGVLLVLLLCVAAQCRQRGLFPAILNLASNAHISTNATCGEKGPEMFCKLVEHVPGRPVRNPQCRICDGNSANPRERHPISHAIDGTNNWWQSPSIQNGREYHWVTITLDLRQVFQVAYVIIKAANAPRPGNWILERSLDGTTFSPWQYYAVSDSECLSRYNITPRRGPPTYRADDEVICTSYYSRLVPLEHGEIHTSLINGRPSADDLSPKLLEFTSARYIRLRLQRIRTLNADLMTLSHREPKELDPIVTRRYYYSIKDISVGGMCICYGHASSCPWDETTKKLQCQCEHNTCGESCNRCCPGYHQQPWRPGTVSSGNTCEACNCHNKAKDCYYDESVAKQKKSLNTAGQFRGGGVCINCLQNTMGINCETCIDGYYRPHKVSPYEDEPCRPCNCDPVGSLSSVCIKDDLHSDLHNGKQPGQCPCKEGYTGEKCDRCQLGYKDYPTCVSCGCNPVGSASDEPCTGPCVCKENVEGKACDRCKPGFYNLKEKNPRGCSECFCFGVSDVCSSLSWPVGQVNSMSGWLVTDLISPRKIPSQQDALGGRHQVSINNTAVMQRLAPKYYWAAPEAYLGNKLTAFGGFLKYTVSYDIPVETVDSNLMSHADVIIKGNGLTLSTQAEGLSLQPYEEYLNVVRLVPENFQDFHSKRQIDRDQLMTVLANVTHLLIRANYNSAKMALYRLESVSLDIASSNAIDLVVAADVEHCECPQGYTGTSCESCLSGYYRVDGILFGGICQPCECHGHAAECNVHGVCIACAHNTTGVHCEQCLPGFYGEPSRGTPGDCQPCACPLTIASNNFSPTCHLNDGDEVVCDWCAPGYSGAWCERCADGYYGNPTVPGESCVPCDCSGNVDPSEAGHCDSVTGECLKCLGNTDGAHCERCADGFYGDAVTAKNCRACECHVKGSHSAVCHLETGLCDCKPNVTGQQCDQCLHGYYGLDSGHGCRPCNCSVAGSVSDGCTDEGQCHCVPGVAGKRCDRCAHGFYAYQDGSCTPCDCPHTQNTCDPETGECVCPPHTQGVKCEECEDGHWGYDAEVGCQACNCSLVGSTHHRCDVVTGHCQCKSKFGGRACDQCSLGYRDFPDCVPCDCDLRGTSGDACNLEQGLCGCVEETGACPCKENVFGPQCNECREGTFALRADNPLGCSPCFCSGLSHLCSELEDYVRTPVTLGSDQPLLRVVSQSNLRGTTEGVYYQAPDFLLDAATVRQHIRAEPFYWRLPQQFQGDQLMAYGGKLKYSVAFYSLDGVGTSNFEPQVLIKGGRIRKQVIYMDAPAPENGVRQEQEVAMRENFWKYFNSVSEKPVTREDFMSVLSDIEYILIKASYGQGLQQSRISDISMEVGRKAEKLHPEEEVASLLENCVCPPGTVGFSCQDCAPGYHRGKLPAGSDRGPRPLVAPCVPCSCNNHSDTCDPNTGKCLNCGDNTAGDHCDVCTSGYYGKVTGSASDCALCACPHSPPASFSPTCVLEGDHDFRCDACLLGYEGKHCERCSSSYYGNPQTPGGSCQKCDCNPHGSVHGDCDRTSGQCVCRLGASGLRCDECEPRHILMETDCVSCDDECVGVLLNDLDEIGDAVLSLNLTGIIPVPYGILSNLENTTKYLQESLLKENMQKDLGKIKLEGVAEETDNLQKKLTRMLASTQKVNRATERIFKESQDLAIAIERLQMSITEIMEKTTLNQTLDEDFLLPNSTLQNMQQNGTSLLEIMQIRDFTQLHQNATLELKAAEDLLSQIQENYQKPLEELEVLKEAASHVLSKHNNELKAAEALVREAEAKMQESNHLLLMVNANLREFSDKKLHVQEEQNLTSELIVQGRGLIDAAAAQTDAVQDALEHLEDHQDKLLLWSAKIRHHIDDLVMHMSQRNAVDLVYRAEDHAAEFQRLADVLYSGLENIRNVSLNATSAAYVHYNIQSLIEESEELARDAHRTVTETSLLSESLVSNGKAAVQRSSRFLKEGNNLSRKLPGIALELSELRNKTNRFQENAVEITRQTNESLLILRAIPKGIRDKGAKTKELATSASQSAVSTLRDVAGLSQELLNTSASLSRVNTTLRETHQLLQDSTMATLLAGRKVKDVEIQANLLFDRLKPLKMLEENLSRNLSEIKLLISQARKQAASIKVAVSADRDCIRAYQPQISSTNYNTLTLNVKTQEPDNLLFYLGSSTASDFLAVEMRRGRVAFLWDLGSGSTRLEFPDFPIDDNRWHSIHVARFGNIGSLSVKEMSSNQKSPTKTSKSPGTANVLDVNNSTLMFVGGLGGQIKKSPAVKVTHFKGCLGEAFLNGKSIGLWNYIEREGKCRGCFGSSQNEDPSFHFDGSGYSVVEKSLPATVTQIIMLFNTFSPNGLLLYLGSYGTKDFLSIELFRGRVKVMTDLGSGPITLLTDRRYNNGTWYKIAFQRNRKQGVLAVIDAYNTSNKETKQGETPGASSDLNRLDKDPIYVGGLPRSRVVRRGVTTKSFVGCIKNLEISRSTFDLLRNSYGVRKGCLLEPIRSVSFLKGGYIELPPKSLSPESEWLVTFATTNSSGIILAALGGDVEKRGDREEAHVPFFSVMLIGGNIEVHVNPGDGTGLRKALLHAPTGTCSDGQAHSISLVRNRRIITVQLDENNPVEMKLGTLVESRTINVSNLYVGGIPEGEGTSLLTMRRSFHGCIKNLIFNLELLDFNSAVGHEQVDLDTCWLSERPKLAPDAEDSKLLPEPRAFPEQCVVDAALEYVPGAHQFGLTQNSHFILPFNQSAVRKKLSVELSIRTFASSGLIYYMAHQNQADYAVLQLHGGRLHFMFDLGKGRTKVSHPALLSDGKWHTVKTDYVKRKGFITVDGRESPMVTVVGDGTMLDVEGLFYLGGLPSQYQARKIGNITHSIPACIGDVTVNSKQLDKDSPVSAFTVNRCYAVAQEGTYFDGSGYAALVKEGYKVQSDVNITLEFRTSSQNGVLLGISTAKVDAIGLELVDGKVLFHVNNGAGRITAAYEPKTATVLCDGKWHTLQANKSKHRITLIVDGNAVGAESPHTQSTSVDTNNPIYVGGYPAGVKQKCLRSQTSFRGCLRKLALIKSPQVQSFDFSRAFELHGVFLHSCPGTES

SEQ ID NO: 105 - protein, 158 aa, Homo sapiens
MGKISSLPTQLFKCCFCDFLKVKMHTMSSSHLFYLALCLLTFTSSATAGPETLCGAELVDALQFVCGDRGFYFNKPTGYGSSSRRAPQTGIVDECCFRSCDLRRLEMYCAPLKPAKSARSVRAQRHTDMPKTQKYQPPSTNKNTKSQRRKGSTFEERK

SEQ ID NO: 106 - protein, 155 aa, Homo sapiens
MAEGEITTFTALTEKFNLPPGNYKKPKLLYCSNGGHFLRILPDGTVDGTRDRSDQHIQLQLSAESVGEVYIKSTETGQYLAMDTDGLLYGSQTPNEECLFLERLEENHYNTYISKKHAEKNWFVGLKKNGSCKRGPRTHYGQKAILFLPLPVSSD

SEQ ID NO: 107 - protein, 288 aa, Homo sapiens
MVGVGGGDVEDVTPRPGGCQISGRGARGCNGIPGAAAWEAALPRRRPRRHPSVNPRSRAAGSPRTRGRRTEERPSGSRLGDRGRGRALPGGRLGGRGRGRAPERVGGRGRGRGTAAPRAAPAARGSRPGPAGTMAAGSITTLPALPEDGGSGAFPPGHFKDPKRLYCKNGGFFLRIHPDGRVDGVREKSDPHIKLQLQAEERGVVSIKGVCANRYLAMKEDGRLLASKCVTDECFFFERLESNNYNTYRSRKYTSWYVALKRTGQYKLGSKTGPGQKAILFLPMSAKS

SEQ ID NO: 108 - protein, 390 aa, Homo sapiens
MPPSGLRLLPLLLPLLWLLVLTPGRPAAGLSTCKTIDMELVKRKRIEAIRGQILSKLRLASPPSQGEVPPGPLPEAVLALYNSTRDRVAGESAEPEPEPEADYYAKEVTRVLMVETHNEIYDKFKQSTHSIYMFFNTSELREAVPEPVLLSRAELRLLRLKLKVEQHVELYQKYSNNSWRYLSNRLLAPSDSPEWLSFDVTGVVRQWLSRGGEIEGFRLSAHCSCDSRDNTLQVDINGFTTGRRGDLATIHGMNRPFLLLMATPLERAQHLQSSRHRRALDTNYCFSSTEKNCCVRQLYIDFRKDLGWKWIHEPKGYHANFCLGPCPYIWSLDTQYSKVLALYNQHNPGASAAPCCVPQALEPLPIVYYVGRKPKVEQLSNMIVRSCKCS

SEQ ID NO: 109 - protein, 442 aa, Homo sapiens
MHYCVLSAFLILHLVTVALSLSTCSTLDMDQFMRKRIEAIRGQILSKLKLTSPPEDYPEPEEVPPEVISIYNSTRDLLQEKASRRAAACERERSDEEYYAKEVYKIDMPPFFPSETVCPVVTTPSGSVGSLCSRQSQVLCGYLDAIPPTFYRPYFRIVRFDVSAMEKNASNLVKAEFRVFRLQNPKARVPEQRIELYQILKSKDLTSPTQRYIDSKVVKTRAEGEWLSFDVTDAVHEWLHHKDRNLGFKISLHCPCCTFVPSNNYIIPNKSEELEARFAGIDGTSTYTSGDQKTIKSTRKKNSGKTPHLLLMLLPSYRLESQQTNRRKKRALDAAYCFRNVQDNCCLRPLYIDFKRDLGWKWIHEPKGYNANFCAGACPYLWSSDTQHSRVLSLYNTINPEASASPCCVSQDLEPLTILYYIGKTPKIEQLSNMIVKSCKCS

SEQ ID NO: 110 - protein, 414 aa, Homo sapiens
MHYCVLSAFLILHLVTVALSLSTCSTLDMDQFMRKRIEAIRGQILSKLKLTSPPEDYPEPEEVPPEVISIYNSTRDLLQEKASRRAAACERERSDEEYYAKEVYKIDMPPFFPSENAIPPTFYRPYFRIVRFDVSAMEKNASNLVKAEFRVFRLQNPKARVPEQRIELYQILKSKDLTSPTQRYIDSKVVKTRAEGEWLSFDVTDAVHEWLHHKDRNLGFKISLHCPCCTFVPSNNYIIPNKSEELEARFAGIDGTSTYTSGDQKTIKSTRKKNSGKTPHLLLMLLPSYRLESQQTNRRKKRALDAAYCFRNVQDNCCLRPLYIDFKRDLGWKWIHEPKGYNANFCAGACPYLWSSDTQHSRVLSLYNTINPEASASPCCVSQDLEPLTILYYIGKTPKIEQLSNMIVKSCKCS

SEQ ID NO: 111 - protein, 377 aa, Homo sapiens
MCDEDETTALVCDNGSGLVKAGFAGDDAPRAVFPSIVGRPRHQGVMVGMGQKDSYVGDEAQSKRGILTLKYPIEHGIITNWDDMEKIWHHTFYNELRVAPEEHPTLLTEAPLNPKANREKMTQIMFETFNVPAMYVAIQAVLSLYASGRTTGIVLDSGDGVTHNVPIYEGYALPHAIMRLDLAGRDLTDYLMKILTERGYSFVTTAEREIVRDIKEKLCYVALDFENEMATAASSSSLEKSYELPDGQVITIGNERFRCPETLFQPSFIGMESAGIHETTYNSIMKCDIDIRKDLYANNVMSGGTTMYPGIADRMQKEITALAPSTMKIKIIAPPERKYSVWIGGSILASLSTFQQMWITKQEYDEAGPSIVHRKCF

SEQ ID NO: 112 - protein, 377 aa, Homo sapiens
MCEEEDSTALVCDNGSGLCKAGFAGDDAPRAVFPSIVGRPRHQGVMVGMGQKDSYVGDEAQSKRGILTLKYPIEHGIITNWDDMEKIWHHSFYNELRVAPEEHPTLLTEAPLNPKANREKMTQIMFETFNVPAMYVAIQAVLSLYASGRTTGIVLDSGDGVTHNVPIYEGYALPHAIMRLDLAGRDLTDYLMKILTERGYSFVTTAEREIVRDIKEKLCYVALDFENEMATAASSSSLEKSYELPDGQVITIGNERFRCPETLFQPSFIGMESAGIHETTYNSIMKCDIDIRKDLYANNVLSGGTTMYPGIADRMQKEITALAPSTMKIKIIAPPERKYSVWIGGSILASLSTFQQMWISKQEYDEAGPSIVHRKCF

SEQ ID NO: 113 - protein, 375 aa, Homo sapiens
MDDDIAALVVDNGSGMCKAGFAGDDAPRAVFPSIVGRPRHQGVMVGMGQKDSYVGDEAQSKRGILTLKYPIEHGIVTNWDDMEKIWHHTFYNELRVAPEEHPVLLTEAPLNPKANREKMTQIMFETFNTPAMYVAIQAVLSLYASGRTTGIVMDSGDGVTHTVPIYEGYALPHAILRLDLAGRDLTDYLMKILTERGYSFTTTAEREIVRDIKEKLCYVALDFEQEMATAASSSSLEKSYELPDGQVITIGNERFRCPEALFQPSFLGMESCGIHETTFNSIMKCDVDIRKDLYANTVLSGGTTMYPGIADRMQKEITALAPSTMKIKIIAPPERKYSVWIGGSILASLSTFQQMWISKQEYDESGPSIVHRKCF

SEQ ID NO: 114 - protein, 377 aa, Homo sapiens
MCDDEETTALVCDNGSGLVKAGFAGDDAPRAVFPSIVGRPRHQGVMVGMGQKDSYVGDEAQSKRGILTLKYPIEHGIITNWDDMEKIWHHTFYNELRVAPEEHPTLLTEAPLNPKANREKMTQIMFETFNVPAMYVAIQAVLSLYASGRTTGIVLDSGDGVTHNVPIYEGYALPHAIMRLDLAGRDLTDYLMKILTERGYSFVTTAEREIVRDIKEKLCYVALDFENEMATAASSSSLEKSYELPDGQVITIGNERFRCPETLFQPSFIGMESAGIHETTYNSIMKCDIDIRKDLYANNVLSGGTTMYPGIADRMQKEITALAPSTMKIKIIAPPERKYSVWIGGSILASLSTFQQMWISKQEYDEAGPSIVHRKCF

SEQ ID NO: 115 - protein, 375 aa, Homo sapiens
MEEEIAALVIDNGSGMCKAGFAGDDAPRAVFPSIVGRPRHQGVMVGMGQKDSYVGDEAQSKRGILTLKYPIEHGIVTNWDDMEKIWHHTFYNELRVAPEEHPVLLTEAPLNPKANREKMTQIMFETFNTPAMYVAIQAVLSLYASGRTTGIVMDSGDGVTHTVPIYEGYALPHAILRLDLAGRDLTDYLMKILTERGYSFTTTAEREIVRDIKEKLCYVALDFEQEMATAASSSSLEKSYELPDGQVITIGNERFRCPEALFQPSFLGMESCGIHETTFNSIMKCDVDIRKDLYANTVLSGGTTMYPGIADRMQKEITALAPSTMKIKIIAPPERKYSVWIGGSILASLSTFQQMWISKQEYDESGPSIVHRKCF

SEQ ID NO: 116 - protein, 376 aa, Homo sapiens
MCEEETTALVCDNGSGLCKAGFAGDDAPRAVFPSIVGRPRHQGVMVGMGQKDSYVGDEAQSKRGILTLKYPIEHGIITNWDDMEKIWHHSFYNELRVAPEEHPTLLTEAPLNPKANREKMTQIMFETFNVPAMYVAIQAVLSLYASGRTTGIVLDSGDGVTHNVPIYEGYALPHAIMRLDLAGRDLTDYLMKILTERGYSFVTTAEREIVRDIKEKLCYVALDFENEMATAASSSSLEKSYELPDGQVITIGNERFRCPETLFQPSFIGMESAGIHETTYNSIMKCDIDIRKDLYANNVLSGGTTMYPGIADRMQKEITALAPSTMKIKIIAPPERKYSVWIGGSILASLSTFQQMWISKPEYDEAGPSIVHRKCF

SEQ ID NO: 117 - protein, 333 aa, Homo sapiens
MCEEETTALVCDNGSGLCKAGFAGDDAPRAVFPSIVGRPRHQIWHHSFYNELRVAPEEHPTLLTEAPLNPKANREKMTQIMFETFNVPAMYVAIQAVLSLYASGRTTGIVLDSGDGVTHNVPIYEGYALPHAIMRLDLAGRDLTDYLMKILTERGYSFVTTAEREIVRDIKEKLCYVALDFENEMATAASSSSLEKSYELPDGQVITIGNERFRCPETLFQPSFIGMESAGIHETTYNSIMKCDIDIRKDLYANNVLSGGTTMYPGIADRMQKEITALAPSTMKIKIIAPPERKYSVWIGGSILASLSTFQQMWISKPEYDEAGPSIVHRKCF

SEQ ID NO: 118 - protein, 207 aa, Homo sapiens
MAGPATQSPMKLMALQLLLWHSALWTVQEATPLGPASSLPQSFLLKCLEQVRKIQGDGAALQEKLVSECATYKLCHPEELVLLGHSLGIPWAPLSSCPSQALQLAGCLSQLHSGLFLYQGLLQALEGISPELGPTLDTLQLDVADFATTIWQQMEELGMAPALQPTQGAMPAFASAFQRRAGGVLVASHLQSFLEVSYRVLRHLAQP

SEQ ID NO: 119 - protein, 204 aa, Homo sapiens
MAGPATQSPMKLMALQLLLWHSALWTVQEATPLGPASSLPQSFLLKCLEQVRKIQGDGAALQEKLCATYKLCHPEELVLLGHSLGIPWAPLSSCPSQALQLAGCLSQLHSGLFLYQGLLQALEGISPELGPTLDTLQLDVADFATTIWQQMEELGMAPALQPTQGAMPAFASAFQRRAGGVLVASHLQSFLEVSYRVLRHLAQP

SEQ ID NO: 120 - protein, 171 aa, Homo sapiens
MAGPATQSPMKLMALQLLLWHSALWTVQEATPLGPASSLPQSFLLKCLEQVRKIQGDGAALQEKLVSEAGCLSQLHSGLFLYQGLLQALEGISPELGPTLDTLQLDVADFATTIWQQMEELGMAPALQPTQGAMPAFASAFQRRAGGVLVASHLQSFLEVSYRVLRHLAQP

SEQ ID NO: 121 - protein, 168 aa, Homo sapiens
MAGPATQSPMKLMALQLLLWHSALWTVQEATPLGPASSLPQSFLLKCLEQVRKIQGDGAALQEKLAGCLSQLHSGLFLYQGLLQALEGISPELGPTLDTLQLDVADFATTIWQQMEELGMAPALQPTQGAMPAFASAFQRRAGGVLVASHLQSFLEVSYRVLRHLAQP

SEQ ID NO: 122 - protein, 211 aa, Homo sapiens [sequence omitted]

SEQ ID NO: 123 - protein, 196 aa, Homo sapiens
MRTLACLLLLGCGYLAHVLAEEAEIPREVIERLARSQIHSIRDLQRLLEIDSVGSEDSLDTSLRAHGVHATKHVPEKRPLPIRRKRSIEEAVPAVCKTRTVIYEIPRSQVDPTSANFLIWPPCVEVKRCTGCCNTSSVKCQPSRVHHRSVKVAKVEYVRKKPKLKEVQVRLEEHLECACATTSLNPDYREEDTDVR

SEQ ID NO: 124 - protein, 241 aa, Homo sapiens
MNRCWALFLSLCCYLRLVSAEGDPIPEELYEMLSDHSIRSFDDLQRLLHGDPGEEDGAELDLNMTRSHSGGELESLARGRRSLGSLTIAEPAMIAECKTRTEVFEISRRLIDRTNANFLVWPPCVEVQRCSGCCNNRNVQCRPTQVQLRPVQVRKIEIVRKKPIFKKATVTLEDHLACKCETVAAARPVTRSPGGSQEQRAKTPQTRVTIRTVRVRRPPKGKHRKFKHTHDKTALKETLGA

SEQ ID NO: 125 - protein, 226 aa, Homo sapiens
MFIMGLGDPIPEELYEMLSDHSIRSFDDLQRLLHGDPGEEDGAELDLNMTRSHSGGELESLARGRRSLGSLTIAEPAMIAECKTRTEVFEISRRLIDRTNANFLVWPPCVEVQRCSGCCNNRNVQCRPTQVQLRPVQVRKIEIVRKKPIFKKATVTLEDHLACKCETVAAARPVTRSPGGSQEQRAKTPQTRVTIRTVRVRRPPKGKHRKFKHTHDKTALKETLGA

SEQ ID NO: 126 - protein, 345 aa, Homo sapiens
MSLFGLLLLTSALAGQRQGTQAESNLSSKFQFSSNKEQNGVQDPQHERIITVSTNGSIHSPRFPHTYPRNTVLVWRLVAVEENVWIQLTFDERFGLEDPEDDICKYDFVEVEEPSDGTILGRWCGSGTVPGKQISKGNQIRIRFVSDEYFPSEPGFCIHYNIVMPQFTEAVSPSVLPPSALPLDLLNNAITAFSTLEDLIRYLEPERWQLDLEDLYRPTWQLLGKAFVFGRKSRVVDLNLLTEEVRLYSCTPRNFSVSIREELKRTDTIFWPGCLLVKRCGGNCACCLHNCNECQCVPSKVTKKYHEVLQLRPKTGVRGLHKSLTDVALEHHEECDCVCRGSTGG

SEQ ID NO: 127 - protein, 370 aa, Homo sapiens
MHRLIFVYTLICANFCSCRDTSATPQSASIKALRNANLRRDESNHLTDLYRRDETIQVKGNGYVQSPRFPNSYPRNLLLTWRLHSQENTRIQLVFDNQFGLEEAENDICRYDFVEVEDISETSTIIRGRWCGHKEVPPRIKSRTNQIKITFKSDDYFVAKPGFKIYYSLLEDFQPAAASETNWESVTSSISGVSYNSPSVTDPTLIADALDKKIAEFDTVEDLLKYFNPESWQEDLENMYLDTPRYRGRSYHDRKSKVDLDRLNDDAKRYSCTPRNYSVNIREELKLANVVFFPRCLLVQRCGGNCGCGTVNWRSCTCNSGKTVKKYHEVLQFEPGHIKRRGRAKTMALVDIQLDHHERCDCICSSRPPR

SEQ ID NO: 128 - protein, 364 aa, Homo sapiens
MHRLIFVYTLICANFCSCRDTSATPQSASIKALRNANLRRDDLYRRDETIQVKGNGYVQSPRFPNSYPRNLLLTWRLHSQENTRIQLVFDNQFGLEEAENDICRYDFVEVEDISETSTIIRGRWCGHKEVPPRIKSRTNQIKITFKSDDYFVAKPGFKIYYSLLEDFQPAAASETNWESVTSSISGVSYNSPSVTDPTLIADALDKKIAEFDTVEDLLKYFNPESWQEDLENMYLDTPRYRGRSYHDRKSKVDLDRLNDDAKRYSCTPRNYSVNIREELKLANVVFFPRCLLVQRCGGNCGCGTVNWRSCTCNSGKTVKKYHEVLQFEPGHIKRRGRAKTMALVDIQLDHHERCDCICSSRPPR

SEQ ID NO: 129 - protein, 469 aa, Homo sapiens
MHSFPPLLLLLFWGVVSHSFPATLETQEQDVDLVQKYLEKYYNLKNDGRQVEKRRNSGPVVEKLKQMQEFFGLKVTGKPDAETLKVMKQPRCGVPDVAQFVLTEGNPRWEQTHLTYRIENYTPDLPRADVDHAIEKAFQLWSNVTPLTFTKVSEGQADIMISFVRGDHRDNSPFDGPGGNLAHAFQPGPGIGGDAHFDEDERWTNNFREYNLHRVAAHELGHSLGLSHSTDIGALMYPSYTFSGDVQLAQDDIDGIQAIYGRSQNPVQPIGPQTPKACDSKLTFDAITTIRGEVMFFKDRFYMRTNPFYPEVELNFISVFWPQLPNGLEAAYEFADRDEVRFFKGNKYWAVQGQNVLHGYPKDIYSSFGFPRTVKHIDAALSEENTGKTYFFVANKYWRYDEYKRSMDPGYPKMIAHDFPGIGHKVDAVFMKDGFFYFFHGTRQYKFDPKTKRILTLQKANSWFNCRKN

SEQ ID NO: 130 - protein, 403 aa, Homo sapiens
MQEFFGLKVTGKPDAETLKVMKQPRCGVPDVAQFVLTEGNPRWEQTHLTYRIENYTPDLPRADVDHAIEKAFQLWSNVTPLTFTKVSEGQADIMISFVRGDHRDNSPFDGPGGNLAHAFQPGPGIGGDAHFDEDERWTNNFREYNLHRVAAHELGHSLGLSHSTDIGALMYPSYTFSGDVQLAQDDIDGIQAIYGRSQNPVQPIGPQTPKACDSKLTFDAITTIRGEVMFFKDRFYMRTNPFYPEVELNFISVFWPQLPNGLEAAYEFADRDEVRFFKGNKYWAVQGQNVLHGYPKDIYSSFGFPRTVKHIDAALSEENTGKTYFFVANKYWRYDEYKRSMDPGYPKMIAHDFPGIGHKVDAVFMKDGFFYFFHGTRQYKFDPKTKRILTLQKANSWFNCRKN

SEQ ID NO: 131 - protein, 467 aa, Homo sapiens [sequence omitted]

SEQ ID NO: 132 - protein, 476 aa, Homo sapiens
MMHLAFLVLLCLPVCSAYPLSGAAKEEDSNKDLAQQYLEKYYNLEKDVKQFRRKDSNLIVKKIQGMQKFLGLEVTGKLDTDTLEVMRKPRCGVPDVGHFSSFPGMPKWRKTHLTYRIVNYTPDLPRDAVDSAIEKALKVWEEVTPLTFSRLYEGEADIMISFAVKEHGDFYSFDGPGHSLAHAYPPGPGLYGDIHFDDDEKWTEDASGTNLFLVAAHELGHSLGLFHSANTEALMYPLYNSFTELAQFRLSQDDVNGIQSLYGPPPASTEEPLVPTKSVPSGSEMPAKCDPALSFDAISTLRGEYLFFKDRYFWRRSHWNPEPEFHLISAFWPSLPSYLDAAYEVNSRDTVFIFKGNEFWAIRGNEVQAGYPRGIHTLGFPPTIRKIDAAVSDKEKKKTYFFAADKYWRFDENSQSMEQGFPRLIADDFPGVEPKVDAVLQAFGFFYFFSGSSQFEFDPNARMVTHILKSNSWLHC

SEQ ID NO: 133 - protein, 470 aa, Homo sapiens
MKFLLILLLQATASGALPLNSSTSLEKNNVLFGERYLEKFYGLEINKLPVTKMKYSGNLMKEKIQEMQHFLGLKVTGQLDTSTLEMMHAPRCGVPDVHHFREMPGGPVWRKHYITYRINNYTPDMNREDVDYAIRKAFQVWSNVTPLKFSKINTGMADILVVFARGAHGDFHAFDGKGGILAHAFGPGSGIGGDAHFDEDEFWTTHSGGTNLFLTAVHEIGHSLGLGHSSDPKAVMFPTYKYVDINTFRLSADDIRGIQSLYGDPKENQRLPNPDNSEPALCDPNLSFDAVTTVGNKIFFFKDRFFWLKVSERPKTSVNLISSLWPTLPSGIEAAYEIEARNQVFLFKDDKYWLISNLRPEPNYPKSIHSFGFPNFVKKIDAAVFNPRFYRTYFFVDNQYWRYDERRQMMDPGYPKLITKNFQGIGPKIDAVFYSKNKYYYFFQGSNQFEYDFLLQRITKTLKSNSWFGC

SEQ ID NO: 134 - protein, 2871 aa, Homo sapiens
MRRGRLLEIALGFTVLLASYTSHGADANLEAGNVKETRASRAKRRGGGGHDALKGPNVCGSRYNAYCCPGWKTLPGGNQCIVPICRHSCGDGFCSRPNMCTCPSGQIAPSCGSRSIQHCNIRCMNGGSCSDDHCLCQKGYIGTHCGQPVCESGCLNGGRCVAPNRCACTYGFTGPQCERDYRTGPCFTVISNQMCQGQLSGIVCTKTLCCATVGRAWGHPCEMCPAQPHPCRRGFIPNIRTGACQDVDECQAIPGLCQGGNCINTVGSFECKCPAGHKLNEVSQKCEDIDECSTIPGICEGGECTNTVSSYFCKCPPGFYTSPDGTRCIDVRPGYCYTALTNGRCSNQLPQSITKMQCCCDAGRCWSPGVTVAPEMCPIRATEDFNKLCSVPMVIPGRPEYPPPPLGPIPPVLPVPPGFPPGPQIPVPRPPVEYLYPSREPPRVLPVNVTDYCQLVRYLCQNGRCIPTPGSYRCECNKGFQLDLRGECIDVDECEKNPCAGGECINNQGSYTCQCRAGYQSTLTRTECRDIDECLQNGRICNNGRCINTDGSFHCVCNAGFHVTRDGKNCEDMDECSIRNMCLNGMCINEDGSFKCICKPGFQLASDGRYCKDINECETPGICMNGRCVNTDGSYRCECFPGLAVGLDGRVCVDTHMRSTCYGGYKRGQCIKPLFGAVTKSECCCASTEYAFGEPCQPCPAQNSAEYQALCSSGPGMTSAGSDINECALDPDICPNGICENLRGTYKCICNSGYEVDSTGKNCVDINECVLNSLLCDNGQCRNTPGSFVCTCPKGFIYKPDLKTCEDIDECESSPCINGVCKNSPGSFICECSSESTLDPTKTICIETIKGTCWQTVIDGRCEININGATLKSQCCSSLGAAWGSPCTLCQVDPICGKGYSRIKGTQCEDIDECEVFPGVCKNGLCVNTRGSFKCQCPSGMTLDATGRICLDIRLETCFLRYEDEECTLPIAGRHRMDACCCSVGAAWGTEECEECPMRNTPEYEELCPRGPGFATKEITNGKPFFKDINECKMIPSLCTHGKCRNTIGSFKCRCDSGFALDSEERNCTDIDECRISPDLCGRGQCVNTPGDFECKCDEGYESGFMMMKNCMDIDECQRDPLLCRGGVCHNTEGSYRCECPPGHQLSPNISACIDINECELSAHLCPNGRCVNLIGKYQCACNPGYHSTPDRLFCVDIDECSIMNGGCETFCTNSEGSYECSCQPGFALMPDQRSCTDIDECEDNPNICDGGQCTNIPGEYRCLCYDGFMASEDMKTCVDVNECDLNPNICLSGTCENTKGSFICHCDMGYSGKKGKTGCTDINECEIGAHNCGKHAVCTNTAGSFKCSCSPGWIGDGIKCTDLDECSNGTHMCSQHADCKNTMGSYRCLCKEGYTGDGFTCTDLDECSENLNLCGNGQCLNAPGGYRCECDMGFVPSADGKACEDIDECSLPNICVFGTCHNLPGLFRCECEIGYELDRSGGNCTDVNECLDPTTCISGNCVNTPGSYICDCPPDFELNPTRVGCVDTRSGNCYLDIRPRGDNGDTACSNEIGVGVSKASCCCSLGKAWGTPCEMCPAVNTSEYKILCPGGEGFRPNPITVILEDIDECQELPGLCQGGKCINTFGSFQCRCPTGYYLNEDTRVCDDVNECETPGICGPGTCYNTVGNYTCICPPDYMQVNGGNNCMDMRRSLCYRNYYADNQTCDGELLFNMTKKMCCCSYNIGRAWNKPCEQCPIPSTDEFATLCGSQRPGFVIDIYTGLPVDIDECREIPGVCENGVCINMVGSFRCECPVGFFYNDKLLVCEDIDECQNGPVCQRNAECINTAGSYRCDCKPGYRFTSTGQCNDRNECQEIPNICSHGQCIDTVGSFYCLCHTGFKTNDDQTMCLDINECERDACGNGTCRNTIGSFNCRCNHGFILSHNNDCIDVDECASGNGNLCRNGQCINTVGSFQCQCNEGYEVAPDGRTCVDINECLLEPRKCAPGTCQNLDGSYRCICPPGYSLQNEKCEDIDECVEEPEICALGTCSNTEGSFKCLCPEGFSLSSSGRRCQDLRMSYCYAKFEGGKCSSPKSRNHSKQECCCALKGEGWGDPCELCPTEPDEAFRQICPYGSGIIVGPDDSAVDMDECKEPDVCKHGQCINTDGSYRCECPFGYILAGNECVDTDECSVGNPCGNGTCKNVIGGFECTCEEGFEPGPMMTCEDINECAQNPLLCAFRCVNTYGSYECKCPVGYVLREDRRMCKDEDECEEGKHDCTEKQMECKNLIGTYMCICGPGYQRRPDGEGCVDENECQTKPGICENGRCLNTRGSYTCECNDGFTASPNQDECLDNREGYCFTEVLQNMCQIGSSNRNPVTKSECCCDGGRGWGPHCEICPFQGTVAFKKLCPHGRGFMTNGADIDECKVIHDVCRNGECVNDRGSYHCICKTGYTPDITGTSCVDLNECNQAPKPCNFICKNTEGSYQCSCPKGYILQEDGRSCKDLDECATKQHNCQFLCVNTIGGFTCKCPPGFTQHHTSCIDNNECTSDINLCGSKGICQNTPGSFTCECQRGFSLDQTGSSCEDVDECEGNHRCQHGCQNIIGGYRCSCPQGYLQHYQWNQCVDENECLSAHICGGASCHNTLGSYKCMCPAGFQYEQFSGGCQDINECGSAQAPCSYGCSNTEGGYLCGCPPGYFRIGQGHCVSGMGMGRGNPEPPVSGEMDDNSLSPEACYECKINGYPKRGRKRRSTNETDASNIEDQSETEANVSLASWDVEKTAIFAFNISHVSNKVRILELLPALTTLTNHNRYLIESGNEDGFFKINQKEGISYLHFTKKKPVAGTYSLQISSTPLYKKKELNQLEDKYDKDYLSGELGDNLKMKIQVLLH

SEQ ID NO: 135 - protein, 2912 aa, Homo sapiens
MGRRRRLCLQLYFLWLGCVVLWAQGTAGQPQPPPPKPPRPQPPPQQVRSATAGSEGGFLAPEYREEGAAVASRVRRRGQQDVLRGPNVCGSRFHSYCCPGWKTLPGGNQCIVPICRNSCGDGFCSRPNMCTCSSGQISSTCGSKSIQQCSVRCMNGGTCADDHCQCQKGYIGTYCGQPVCENGCQNGGRCIGPNRCACVYGFTGPQCERDYRTGPCFTQVNNQMCQGQLTGIVCTKTLCCATIGRAWGHPCEMCPAQPQPCRRGFIPNIRTGACQDVDECQAIPGICQGGNCINTVGSFECRCPAGHKQSETTQKCEDIDECSIIPGICETGECSNTVGSYFCVCPRGYVTSTDGSRCIDQRTGMCFSGLVNGRCAQELPGRMTKMQCCCEPGRCWGIGTIPEACPVRGSEEYRRLCMDGLPMGGIPGSAGSRPGGTGGNGFAPSGNGNGYGPGGTGFIPIPGGNGFSPGVGGAGVGAGGQGPIITGLTILNQTIDICKHHANLCLNGRCIPTVSSYRCECNMGYKQDANGDCIDVDECTSNPCTNGDCVNTPGSYYCKCHAGFQRTPTKQACIDIDECIQNGVLCKNGRCVNTDGSFQCICNAGFELTTDGKNCVDHDECTTTNMCLNGMCINEDGSFKCICKPGFVLAPNGRYCTDVDECQTPGICMNGHCINSEGSFRCDCPPGLAVGMDGRVCVDTHMRSTCYGGIKKGVCVRPFPGAVTKSECCCANPDYGFGEPCQPCPAKNSAEFHGLCSSGVGITVDGRDINECALDPDICANGICENLRGSYRCNCNSGYEPDASGRNCIDIDECLVNRLLCDNGLCRNTPGSYSCTCPPGYVFRTETETCEDINECESNPCVNGACRNNLGSFNCECSPGSKLSSTGLICIDSLKGTCWLNIQDSRCEVNINGATLKSECCATLGAAWGSPCERCELDTACPRGLARIKGVTCEDVNECEVFPGVCPNGRCVNSKGSFHCECPEGLTLDGTGRVCLDIRMEQCYLKWDEDECIHPVPGKFRMDACCCAVGAAWGTECEECPKPGTKEYETLCPRGAGFANRGDVLTGRPFYKDINECKAFPGMCTYGKCRNTIGSFKCRCNSGFALDMEERNCTDIDECRISPDLCGSGICVNTPGSFECECFEGYESGFMMMKNCMDIDECERNPLLCRGGTCVNTEGSFQCDCPLGHELSPSREDCVDINECSLSDNLCRNGKCVNMIGTYQCSCNPGYQATPDRQGCTDIDECMIMNGGCDTQCTNSEGSYECSCSEGYALMPDGRSCADIDECENNPDICDGGQCTNIPGEYRCLCYDGFMASMDMKTCIDVNECDLNSNICMFGECENTKGSFICHCQLGYSVKKGTTGCTDVDECEIGAHNCDMHASCLNIPGSFKCSCREGWIGNGIKCIDLDECSNGTHQCSINAQCVNTPGSYRCACSEGFTGDGFTCSDVDECAENINLCENGQCLNVPGAYRCECEMGFTPASDSRSCQDIDECSFQNICVFGTCNNLPGMFHCICDDGYELDRTGGNCTDIDECADPINCVNGLCVNTPGRYECNCPPDFQLNPTGVGCVDNRVGNCYLKFGPRGDGSLSCNTEIGVGVSRSSCCCSLGKAWGNPCETCPPVNSTEYYTLCPGGEGFRPNPITIILEDIDECQELPGLCQGGNCINTFGSFQCECPQGYYLSEDTRICEDIDECFAHPGVCGPGTCYNTLGNYTCICPPEYMQVNGGHNCMDMRKSFCYRSYNGTTCENELPFNVTKRMCCCTYNVGKAWNKPCEPCPTPGTADFKTICGNIPGFTFDIHTGKAVDIDECKEIPGICANGVCINQIGSFRCECPTGFSYNDLLLVCEDIDECSNGDNLCQRNADCINSPGSYRCECAAGFKLSPNGACVDRNECLEIPNVCSHGLCVDLQGSYQCICHNGFKASQDQTMCMDVDECERHPCGNGTCKNTVGSYNCLCYPGFELTHNNDCLDIDECSSFFGQVCRNGRCFNEIGSFKCLCNEGYELTPDGKNCIDTNECVALPGSCSPGTCQNLEGSFRCICPPGYEVKSENCIDINECDEDPNICLFGSCTNTPGGFQCLCPPGFVLSDNGRRCFDTRQSFCFTNFENGKCSVPKAFNTTKAKCCCSKMPGEGWGDPCELCPKDDEVAFQDLCPYGHGTVPSLHDTREDVNECLESPGICSNGQCINTDGSFRCECPMGYNLDYTGVRCVDTDECSIGNPCGNGTCTNVIGSFECNCNEGFEPGPMMNCEDINECAQNPLLCAFRCMNTFGSYECTCPIGYALREDQKMCKDLDECAEGLHDCESRGMMCKNLIGTFMCICPPGMARRPDGEGCVDENECRTKPGICENGRCVNIIGSYRCECNEGFQSSSSGTECLDNRQGLCFAEVLQTICQMASSSRNLVTKSECCCDGGRGWGHQCELCPLPGTAQYKKICPHGPGYTTDGRDIDECKVMPNLCTNGQCINTMGSFRCFCKVGYTTDISGTSCIDLDECSQSPKPCNYICKNTEGSYQCSCPRGYVLQEDGKTCKDLDECQTKQHNCQFLCVNTLGGFTCKCPPGFTQHHTACIDNNECGSQPSLCGAKGICQNTPGSFSCECQRGFSLDATGLNCEDVDECDGNHRCQHGCQNILGGYRCGCPQGYIQHYQWNQCVDENECSNPNACGSASCYNTLGSYKCACPSGFSFDQFSSACHDVNECSSSKNPCNYGCSNTEGGYLCGCPPGYYRVGQGHCVSGMGFNKGQYLSLDTEVDEENALSPEACYECKINGYSKKDSRQKRSIHEPDPTAVEQISLESVDMDSPVNMKFNLSHLGSKEHILELRPAIQPLNNHIRYVISQGNDDSVFRIHQRNGLSYLHTAKKKLMPGTYTLEITSIPLYKKKELKKLEESNEDDYLLGELGEALRMRLQIQLY

SEQ ID NO: 136 - protein, 574 aa, Homo sapiens
MALARGSRQLGALVWGACLCVLVHGQQAQPGQGSDPARWRQLIQWENNGQVYSLLNSGSEYVPAGPQRSESSSRVLLAGAPQAQQRRSHGSPRRRQAPSLPLPGRVGSDTVRGQARHPFGFGQVPDNWREVAVGDSTGMARARTSVSQQRHGGSASSVSASAFASTYRQQPSYPQQFPYPQAPFVSQYENYDPASRTYDQGFVYYRPAGGGVGAGAAAVASAGVIYPYQPRARYEEYGGGEELPEYPPQGFYPAPERPYVPPPPPPPDGLDRRYSHSLYSEGTPGFEQAYPDPGPEAAQAHGGDPRLGWYPPYANPPPEAYGPPRALEPPYLPVRSSDTPPPGGERNGAQQGRLSVGSVYRPNQNGRGLPDLVPDPNYVQASTYVQRAHLYSLRCAAEEKCLASTAYAPEATDYDVRVLLRFPQRVKNQGTADFLPNRPRHTWEWHSCHQHYHSMDEFSHYDLLDAATGKKVAEGHKASFCLEDSTCDFGNLKRYACTSHTQGLSPGCYDTYNADIDCQWIDITDVQPGNYILKVHVNPKYIVLESDFTNNVVRCNIHYTGRYVSATNCKIVQS

SEQ ID NO: 137 - protein, 774 aa, Homo sapiens
MERPLCSHLCSCLAMLALLSPLSLAQYDSWPHYPEYFQQPAPEYHQPQAPANVAKIQLRLAGQKRKHSEGRVEVYYDGQWGTVCDDDFSIHAAHVVCRELGYVEAKSWTASSSYGKGEGPIWLDNLHCTGNEATLAACTSNGWGVTDCKHTEDVGVVCSDKRIPGFKFDNSLINQIENLNIQVEDIRIRAILSTYRKRTPVMEGYVEVKEGKTWKQICDKHWTAKNSRVVCGMFGFPGERTYNTKVYKMFASRRKQRYWPFSMDCTGTEAHISSCKLGPQVSLDPMKNVTCENGLPAVVSCVPGQVFSPDGPSRFRKAYKPEQPLVRLRGGAYIGEGRVEVLKNGEWGTVCDDKWDLVSASVVCRELGFGSAKEAVTGSRLGQGIGPIHLNEIQCTGNEKSIIDCKFNAESQGCNHEEDAGVRCNTPAMGLQKKLRLNGGRNPYEGRVEVLVERNGSLVWGMVCGQNWGIVEAMVVCRQLGLGFASNAFQETWYWHGDVNSNKVVMSGVKCSGTELSLAHCRHDGEDVACPQGGVQYGAGVACSETAPDLVLNAEMVQQTTYLEDRPMFMLQCAMEENCLSASAAQTDPTTGYRRLLRFSSQIHNNGQSDFRPKNGRHAWIWHDCHRHYHSMEVFTHYDLLNLNGTKVAEGHKASFCLEDTECEGDIQKNYECANFGDQGITMGCWDMYRHDIDCQWVDITDVPPGDYLFQVVINPNFEVAESDYSNNIMKCRSRYDGHRIWMYNCHIGGSFSEETEKKFEHFSGLLNNQLSPQ

SEQ ID NO: 138 - protein, 753 aa, Homo sapiens
MRPVSVWQWSPWGLLLCLLCSSCLGSPSPSTGPEKKAGSQGLRFRLAGFPRKPYEGRVEIQRAGEWGTICDDDFTLQAAHILCRELGFTEATGWTHSAKYGPGTGRIWLDNLSCSGTEQSVTECASRGWGNSDCTHDEDAGVICKDQRLPGFSDSNVIEVEHHLQVEEVRIRPAVGWGRRPLPVTEGLVEVRLPDGWSQVCDKGWSAHNSHVVCGMLGFPSEKRVNAAFYRLLAQRQQHSFGLHGVACVGTEAHLSLCSLEFYRANDTARCPGGGPAVVSCVPGPVYAASSGQKKQQQSKPQGEARVRLKGGAHPGEGRVEVLKASTWGTVCDRKWDLHAASVVCRELGFGSAREALSGARMGQGMGAIHLSEVRCSGQELSLWKCPHKNITAEDCSHSQDAGVRCNLPYTGAETRIRLSGGRSQHEGRVEVQIGGPGPLRWGLICGDDWGTLEAMVACRQLGLGYANHGLQETWYWDSGNITEVVMSGVRCTGTELSLDQCAHHGTHITCKRTGTRFTAGVICSETASDLLLHSALVQETAYIEDRPLHMLYCAAEENCLASSARSANWPYGHRRLLRFSSQIHNLGRADFRPKAGRHSWVWHECHGHYHSMDIFTHYDILTPNGTKVAEGHKASFCLEDTECQEDVSKRYECANFGEQGITVGCWDLYRHDIDCQWIDITDVKPGNYILQVVINPNFEVAESDFTNNAMKCNCKYDGHRIWVHNCHIGDAFSEEANRRFERYPGQTSNQII

SEQ ID NO: 139 - protein, 608 aa, Homo sapiens
MRPVSVWQWSPWGLLLCLLCSSCLGSPSPSTGPEKKAGSQGLRFRLAGFPRKPYEGRVEIQRAGEWGTICDDDFTLQAAHILCRELGFTEATGWTHSAKYGPGTGRIWLDNLSCSGTEQSVTECASRGWGNSDCTHDEDAGVICKDQRLPGFSDSNVIEARVRLKGGAHPGEGRVEVLKASTWGTVCDRKWDLHAASVVCRELGFGSAREALSGARMGQGMGAIHLSEVRCSGQELSLWKCPHKNITAEDCSHSQDAGVRCNLPYTGAETRIRLSGGRSQHEGRVEVQIGGPGPLRWGLICGDDWGTLEAMVACRQLGLGYANHGLQETWYWDSGNITEVVMSGVRCTGTELSLDQCAHHGTHITCKRTGTRFTAGVICSETASDLLLHSALVQETAYIEDRPLHMLYCAAEENCLASSARSANWPYGHRRLLRFSSQIHNLGRADFRPKAGRHSWVWHECHGHYHSMDIFTHYDILTPNGTKVAEGHKASFCLEDTECQEDVSKRYECANFGEQGITVGCWDLYRHDIDCQWIDITDVKPGNYILQVVINPNFEVAESDFTNNAMKCNCKYDGHRIWVHNCHIGDAFSEEANRRFERYPGQTSNQII

SEQ ID NO: 140 - protein, 392 aa, Homo sapiens
MGQGMGAIHLSEVRCSGQELSLWKCPHKNITAEDCSHSQDAGVRCNLPYTGAETRIRLSGGRSQHEGRVEVQIGGPGPLRWGLICGDDWGTLEAMVACRQLGLGYANHGLQETWYWDSGNITEVVMSGVRCTGTELSLDQCAHHGTHITCKRTGTRFTAGVICSETASDLLLHSALVQETAYIEDRPLHMLYCAAEENCLASSARSANWPYGHRRLLRFSSQIHNLGRADFRPKAGRHSWVWHECHGHYHSMDIFTHYDILTPNGTKVAEGHKASFCLEDTECQEDVSKRYECANFGEQGITVGCWDLYRHDIDCQWIDITDVKPGNYILQVVINPNFEVAESDFTNNAMKCNCKYDGHRIWVHNCHIGDAFSEEANRRFERYPGQTSNQII

SEQ ID NO: 141 - protein, 756 aa, Homo sapiens
MAWSPPATLFLFLLLLGQPPPSRPQSLGTTKLRLVGPESKPEEGRLEVLHQGQWGTVCDDNFAIQEATVACRQLGFEAALTWAHSAKYGQGEGPIWLDNVRCVGTESSLDQCGSNGWGVSDCSHSEDVGVICHPRRHRGYLSETVSNALGPQGRRLEEVRLKPILASAKQHSPVTEGAVEVKYEGHWRQVCDQGWTMNNSRVVCGMLGFPSEVPVDSHYYRKVWDLKMRDPKSRLKSLTNKNSFWIHQVTCLGTEPHMANCQVQVAPARGKLRPACPGGMHAVVSCVAGPHFRPPKTKPQRKGSWAEEPRVRLRSGAQVGEGRVEVLMNRQWGTVCDHRWNLISASVVCRQLGFGSAREALFGARLGQGLGPIHLSEVRCRGYERTLSDCPALEGSQNGCQHENDAAVRCNVPNMGFQNQVRLAGGRIPEEGLLEVQVEVNGVPRWGSVCSENWGLTEAMVACRQLGLGFAIHAYKETWFWSGTPRAQEVVMSGVRCSGTELALQQCQRHGPVHCSHGGGRFLAGVSCMDSAPDLVMNAQLVQETAYLEDRPLSQLYCAHEENCLSKSADHMDWPYGYRRLLRFSTQIYNLGRTDFRPKTGRDSWVWHQCHRHYHSIEVFTHYDLLTLNGSKVAEGHKASFCLEDTNCPTGLQRRYACANFGEQGVTVGCWDTYRHDIDCQWVDITDVGPGNYIFQVIVNPHYEVAESDFSNNMLQCRCKYDGHRVWLHNCHTGNSYPANAELSLEQEQRLRNNLI

SEQ ID NO: 142 - protein, 183 aa, Homo sapiens
MRAAYLFLLFLPAGLLAQGQYDLDPLPPFPDHVQYTHYSDQIDNPDYYDYQEVTPRPSEEQFQFQSQQQVQQEVIPAPTPEPGNAELEPTEPGPLDCREEQYPCTRLYSIHRPCKQCLNEVCFYSLRRVYVINKEICVRTVCAHEELLRADLCRDKFSKCGVMASSGLCQSVAASCARSCGSC

SEQ ID NO: 143 - protein, 182 aa, Homo sapiens
MRAAYLFLLFLPGLLAQGQYDLDPLPPFPDHVQYTHYSDQIDNPDYYDYQEVTPRPSEEQFQFQSQQQVQQEVIPAPTPEPGNAELEPTEPGPLDCREEQYPCTRLYSIHRPCKQCLNEVCFYSLRRVYVINKEICVRTVCAHEELLRADLCRDKFSKCGVMASSGLCQSVAASCARSCGSC

SEQ ID NO: 144 - protein, 173 aa, Homo sapiens
MSLLGPKVLLFLAAFIITSDWIPLGVNSQRGDDVTQATPETFTEDPNLVNDPATDETVLAVLADIAPSTDDLASLSEKNTTAECWDEKFTCTRLYSVHRPVKQCIHQLCFTSLRRMYIVNKEICSRLVCKEHEAMKDELCRQMAGLPPRRLRRSNYFRLPPCENVDLQRPNGL

SEQ ID NO: 145 - protein, 824 aa, Homo sapiens
MRQSLLFLTSVVPFVLAPRPPDDPGFGPHQRLEKLDSLLSDYDILSLSNIQQHSVRKRDLQTSTHVETLLTFSALKRHFKLYLTSSTERFSQNFKVVVVDGKNESEYTVKWQDFFTGHVVGEPDSRVLAHIRDDDVIIRINTDGAEYNIEPLWRFVNDTKDKRMLVYKSEDIKNVSRLQSPKVCGYLKVDNEELLPKGLVDREPPEELVHRVKRRADPDPMKNTCKLLVVADHRFYRYMGRGEESTTTNYLIELIDRVDDIYRNTSWDNAGFKGYGIQIEQIRILKSPQEVKPGEKHYNMAKSYPNEEKDAWDVKMLLEQFSFDIAEEASKVCLAHLFTYQDFDMGTLGLAYVGSPRANSHGGVCPKAYYSPVGKKNIYLNSGLTSTKNYGKTILTKEADLVTTHELGHNFGAEHDPDGLAECAPNEDQGGKYVMYPIAVSGDHENNKMFSNCSKQSIYKTIESKAQECFQERSNKVCGNSRVDEGEECDPGIMYLNNDTCCNSDCTLKEGVQCSDRNSPCCKNCQFETAQKKCQEAINATCKGVSYCTGNSSECPPPGNAEDDTVCLDLGKCKDGKCIPFCEREQQLESCACNETDNSCKVCCRDLSGRCVPYVDAEQKNLFLRKGKPCTVGFCDMNGKCEKRVQDVIERFWDFIDQLSINTFGKFLADNIVGSVLVFSLIFWIPFSILVHCVDKKLDKQYESLSLFHPSNVEMLSSMDSASVRIIKPFPAPQTPGRLQPAPVIPSAPAAPKLDHQRMDTIQEDPSTDSHMDEDGFEKDPFPNSSTAAKSFEDLTDHPVTRSEKAASFKLQRQNRVDSKETEC

SEQ ID NO: 146 - protein, 824 aa, Homo sapiens; identical to SEQ ID NO: 145

SEQ ID NO: 147 - protein, 713 aa, Homo sapiens
MATGQDRVVALVDMDCFFVQVEQRQNPHLRNKPCAVVQYKSWKGGGIIAVSYEARAFGVTRSMWADDAKKLCPDLLLAQVRESRGKANLTKYREASVEVMEIMSRFAVIERASIDEAYVDLTSAVQERLQKLQGQPISADLLPSTYIEGLPQGPTTAEETVQKEGMRKQGLFQWLDSLQIDNLTSPDLQLTVGAVIVEEMRAAIERETGFQCSAGISHNKVLAKLACGLNKPNRQTLVSHGSVPQLFSQMPIRKIRSLGGKLGASVIEILGIEYMGELTQFTESQLQSHFGEKNGSWLYAMCRGIEHDPVKPRQLPKTIGCSKNFPGKTALATREQVQWWLLQLAQELEERLTKDRNDNDRVATQLVVSIRVQGDKRLSSLRRCCALTRYDAHKMSHDAFTVIKNCNTSGIQTEWSPPLTMLFLCATKFSASAPSSSTDITSFLSSDPSSLPKVPVTSSEAKTQGSGPAVTATKKATTSLESFFQKAAERQKVKEASLSSLTAPTQAPMSNSPSKPSLPFQTSQSTGTEPFFKQKSLLLKQKQLNNSSVSSPQQNPWSNCKALPNSLPTEYPGCVPVCEGVSKLEESSKATPAEMDLAHNSQSMHASSASKSVLEVTQKATPNPSLLAAEDQVPCEKCGSLVPVWDMPEHMDYHFALELQKSFLQPHSSNPQVVSAVSHQGKRNPKSPLACTNKRPRPEGMQTLESFFKPLTH

SEQ ID NO: 148 - protein, 589 aa, Homo sapiens
MKLVHLESLEVCGQMMLRSYVQIFYWHKFVSPVGKLTSPKGMRKQGLFQWLDSLQIDNLTSPDLQLTVGAVIVEEMRAAIERETGFQCSAGISHNKVLAKLACGLNKPNRQTLVSHGSVPQLFSQMPIRKIRSLGGKLGASVIEILGIEYMGELTQFTESQLQSHFGEKNGSWLYAMCRGIEHDPVKPRQLPKTIGCSKNFPGKTALATREQVQWWLLQLAQELEERLTKDRNDNDRVATQLVVSIRVQGDKRLSSLRRCCALTRYDAHKMSHDAFTVIKNCNTSGIQTEWSPPLTMLFLCATKFSASAPSSSTDITSFLSSDPSSLPKVPVTSSEAKTQGSGPAVTATKKATTSLESFFQKAAERQKVKEASLSSLTAPTQAPMSNSPSKPSLPFQTSQSTGTEPFFKQKSLLLKQKQLNNSSVSSPQQNPWSNCKALPNSLPTEYPGCVPVCEGVSKLEESSKATPAEMDLAHNSQSMHASSASKSVLEVTQKATPNPSLLAAEDQVPCEKCGSLVPVWDMPEHMDYHFALELQKSFLQPHSSNPQVVSAVSHQGKRNPKSPLACTNKRPRPEGMQTLESFFKPLTH

SEQ ID NO: 149 - protein, 414 aa, Homo sapiens
MATGQDRVVALVDMDCFFVQVEQRQNPHLRNKPCAVVQYKSWKGGGIIAVSYEARAFGVTRSMWADDAKKLCPDLLLAQVRESRGKANLTKYREASVEVMEIMSRFAVIERASIDEAYVDLTSAVQERLQKLQGQPISADLLPSTYIEGLPQGPTTAEETVQKEGMRKQGLFQWLDSLQIDNLTSPDLQLTVGAVIVEEMRAAIERETGFQCSAGISHNKVLAKLACGLNKPNRQTLVSHGSVPQLFSQMPIRKIRSLGGKLGASVIEILGIEYMGELTQFTESQLQSHFGEKNGSWLYAMCRGIEHDPVKPRQLPKTIGCSKNFPGKTALATREQVQWWLLQLAQELEERLTKDRNDNDRVATQLVVSIRVQGDKRLSSLRRCCALTRYDAHKMSHDAFTVIKNCNTSGIQTE

SEQ ID NO: 150 - protein, 429 aa, Homo sapiens
MRSLGANMAAALRAAGVLLRDPLASSSWRVCQPWRWKSGAAAAAVTTETAQHAQGAKPQVQPQKRYESNIRKPKTGILMLNMGGPETLGDVHDFLLRLFLDRDLMTLPIQNKLAPFIAKRRTPKIQEQYRRIGGGSPIKIWTSKQGEGMVKLLDELSPNTAPHKYYIGFRYVHPLTEEAIEEMERDGLERAIAFTQYPQYSCSTTGSSLNAIYRYYNQVGRKPTMKWSTIDRWPTHHLLIQCFADHILKELDHFPLEKRSEVVILFSAHSLPMSVVNRGDPYPQEVSATVQKVMERLEYCNPYRLVWQSKVGPMPWLGPQTDESIKGLCERGRKNILLVPIAFTSDHIETLYELDIEYSQVLAKECGVENIRRAESLNGNPLFSKALADLVHSHIQSNELCSKQLTLSCPLCVNPVCRETKSFFTSQQL

SEQ ID NO: 151 - protein, 423 aa, Homo sapiens
MRSLGANMAAALRAAGVLLRDPLASSSWRVCQPWRWKSGAAAAAVTTETAQHAQGAKPQVQPQKRKPKTGILMLNMGGPETLGDVHDFLLRLFLDRDLMTLPIQNKLAPFIAKRRTPKIQEQYRRIGGGSPIKIWTSKQGEGMVKLLDELSPNTAPHKYYIGFRYVHPLTEEAIEEMERDGLERAIAFTQYPQYSCSTTGSSLNAIYRYYNQVGRKPTMKWSTIDRWPTHHLLIQCFADHILKELDHFPLEKRSEVVILFSAHSLPMSVVNRGDPYPQEVSATVQKVMERLEYCNPYRLVWQSKVGPMPWLGPQTDESIKGLCERGRKNILLVPIAFTSDHIETLYELDIEYSQVLAKECGVENIRRAESLNGNPLFSKALADLVHSHIQSNELCSKQLTLSCPLCVNPVCRETKSFFTSQQL

SEQ ID NO: 152 - protein, 4061 aa, Homo sapiens
MSTLLENIFAIINLFKQYSKKDKNTDTLSKKELKELLEKEFRQILKNPDDPDMVDVFMDHLDIDHNKKIDFTEFLLMVFKLAQAYYESTRKENLPISGHKHRKHSHHDKHEDNKQEENKENRKRPSSLERRNNRKGNKGRSKSPRETGGKRHESSSEKKERKGYSPTHREEEYGKNHHNSSKKEKNKTENTRLGDNRKRLSERLEEKEDNEEGVYDYENTGRMTQKWIQSGHIATYYTIQDEAYDTTDSLLEENKIYERSRSSDGKSSSQVNRSRHENTSQVPLQESRTRKRRGSRVSQDRDSEGHSEDSERHSGSASRNHHGSAWEQSRDGSRHPRSHDEDRASHGHSADSSRQSGTRHAETSSRGQTASSHEQARSSPGERHGSGHQQSADSSRHSATGRGQASSAVSDRGHRGSSGSQASDSEGHSENSDTQSVSGHGKAGLRQQSHQESTRGRSGERSGRSGSSLYQVSTHEQPDSAHGRTGTSTGGRQGSHHEQARDSSRHSASQEGQDTIRGHPGSSRGGRQGSHHEQSVNRSGHSGSHHSHTTSQGRSDASHGQSGSRSASRQTRNEEQSGDGTRHSGSRHHEASSQADSSRHSQVGQGQSSGPRTSRNQGSSVSQDSDSQGHSEDSERWSGSASRNHHGSAQEQSRDGSRHPRSHHEDRAGHGHSADSSRKSGTRHTQNSSSGQAASSHEQARSSAGERHGSRHQLQSADSSRHSGTGHGQASSAVRDSGHRGSSGSQATDSEGHSEDSDTQSVSGHGQAGHHQQSHQESARDRSGERSRRSGSFLYQVSTHKQSESSHGWTGPSTGVRQGSHHEQARDNSRHSASQDGQDTIRGHPGSSRRGRQGSHHEQSVDRSGHSGSHHSHTTSQGRSDASRGQSGSRSASRTTRNEEQSRDGSRHSGSRHHEASSHADISRHSQAGQGQSEGSRTSRRQGSSVSQDSDSEGHSEDSERWSGSASRNHRGSAQEQSRHGSRHPRSHHEDRAGHGHSADSSRQSGTPHAETSSGGQAASSHEQARSSPGERHGSRHQQSADSSRHSGIPRRQASSAVRDSGHWGSSGSQASDSEGHSEESDTQSVSGHGQDGPHQQSHQESARDWSGGRSGRSGSFIYQVSTHEQSESAHGRTRTSTGRRQGSHHEQARDSSRHSASQEGQDTIRAHPGSRRGGRQGSHHEQSVDRSGHSGSHHSHTTSQGRSDASHGQSGSRSASRQTRKDKQSGDGSRHSGSRHHEAASWADSSRHSQVGQEQSSGSRTSRHQGSSVSQDSDSERHSDDSERLSGSASRNHHGSSREQSRDGSRHPGFHQEDRASHGHSADSSRQSGTHHTESSSHGQAVSSHEQARSSPGERHGSRHQQSADSSRHSGIGHRQASSAVRDSGHRGSSGSQVTNSEGHSEDSDTQSVSAHGQAGPHQQSHKESARGQSGESSGRSRSFLYQVSSHEQSESTHGQTAPSTGGRQGSRHEQARNSSRHSASQDGQDTIRGHPGSSRGGRQGSYHEQSVDRSGHSGYHHSHTTPQGRSDASHGQSGPRSASRQTRNEEQSGDGSRHSGSRHHEPSTRAGSSRHSQVGQGESAGSKTSRRQGSSVSQDRDSEGHSEDSERRSESASRNHYGSAREQSRHGSRNPRSHQEDRASHGHSAESSRQSGTRHAETSSGGQAASSQEQARSSPGERHGSRHQQSADSSTDSGTGRRQDSSVVGDSGNRGSSGSQASDSEGHSEESDTQSVSAHGQAGPHQQSHQESTRGQSGERSGRSGSFLYQVSTHEQSESAHGRTGPSTGGRQRSRHEQARDSSRHSASQEGQDTIRGHPGSSRGGRQGSHYEQSVDSSGHSGSHHSHTTSQERSDVSRGQSGSRSVSRQTRNEKQSGDGSRHSGSRHHEASSRADSSRHSQVGQGQSSGPRTSRNQGSSVSQDSDSQGHSEDSERWSGSASRNHLGSAWEQSRDGSRHPGSHHEDRAGHGHSADSSRQSGTRHTESSSRGQAASSHEQARSSAGERHGSHHQLQSADSSRHSGIGHGQASSAVRDSGHRGYSGSQASDSEGHSEDSDTQSVSAQGKAGPHQQSHKESARGQSGESSGRSGSFLYQVSTHEQSESTHGQSAPSTGGRQGSHYDQAQDSSRHSASQEGQDTIRGHPGPSRGGRQGSHQEQSVDRSGHSGSHHSHTTSQGRSDASRGQSGSRSASRKTYDKEQSGDGSRHSGSHHHEASSWADSSRHSLVGQGQSSGPRTSRPRGSSVSQDSDSEGHSEDSERRSGSASRNHHGSAQEQSRDGSRHPRSHHEDRAGHGHSAESSRQSGTHHAENSSGGQAASSHEQARSSAGERHGSHHQQSADSSRHSGIGHGQASSAVRDSGHRGSSGSQASDSEGHSEDSDTQSVSAHGQAGPHQQSHQESTRGRSAGRSGRSGSFLYQVSTHEQSESAHGRTGTSTGGRQGSHHKQARDSSRHSTSQEGQDTIHGHPGSSSGGRQGSHYEQLVDRSGHSGSHHSHTTSQGRSDASHGHSGSRSASRQTRNDEQSGDGSRHSGSRHHEASSRADSSGHSQVGQGQSEGPRTSRNWGSSFSQDSDSQGHSEDSERWSGSASRNHHGSAQEQLRDGSRHPRSHQEDRAGHGHSADSSRQSGTRHTQTSSGGQAASSHEQARSSAGERHGSHHQQSADSSRHSGIGHGQASSAVRDSGHRGYSGSQASDNEGHSEDSDTQSVSAHGQAGSHQQSHQESARGRSGETSGHSGSFLYQVSTHEQSESSHGWTGPSTRGRQGSRHEQAQDSSRHSASQDGQDTIRGHPGSSRGGRQGYHHEHSVDSSGHSGSHHSHTTSQGRSDASRGQSGSRSASRTTRNEEQSGDGSRHSGSRHHEASTHADISRHSQAVQGQSEGSRRSRRQGSSVSQDSDSEGHSEDSERWSGSASRNHHGSAQEQLRDGSRHPRSHQEDRAGHGHSADSSRQSGTRHTQTSSGGQAASSHEQARSSAGERHGSHHQQSADSSRHSGIGHGQASSAVRDSGHRGYSGSQASDNEGHSEDSDTQSVSAHGQAGSHQQSHQESARGRSGETSGHSGSFLYQVSTHEQSESSHGWTGPSTRGRQGSRHEQAQDSSRHSASQYGQDTIRGHPGSSRGGRQGYHHEHSVDSSGHSGSHHSHTTSQGRSDASRGQSGSRSASRTTRNEEQSGDSSRHSVSRHHEASTHADISRHSQAVQGQSEGSRRSRRQGSSVSQDSDSEGHSEDSERWSGSASRNHRGSVQEQSRHGSRHPRSHHEDRAGHGHSADRSRQSGTRHAETSSGGQAASSHEQARSSPGERHGSRHQQSADSSRHSGIPRGQASSAVRDSRHWGSSGSQASDSEGHSEESDTQSVSGHGQAGPHQQSHQESARDRSGGRSGRSGSFLYQVSTHEQSESAHGRTRTSTGRRQGSHHEQARDSSRHSASQEGQDTIRGHPGSSRRGRQGSHYEQSVDRSGHSGSHHSHTTSQGRSDASRGQSGSRSASRQTRNDEQSGDGSRHSWSHHHEASTQADSSRHSQSGQGQSAGPRTSRNQGSSVSQDSDSQGHSEDSERWSGSASRNHRGSAQEQSRDGSRHPTSHHEDRAGHGHSAESSRQSGTHHAENSSGGQAASSHEQARSSAGERHGSHHQQSADSSRHSGIGHGQASSAVRDSGHRGSSGSQASDSEGHSEDSDTQSVSAHGQAGPHQQSHQESTRGRSAGRSGRSGSFLYQVSTHEQSESAHGRAGPSTGGRQGSRHEQARDSSRHSASQEGQDTIRGHPGSRRGGRQGSYHEQSVDRSGHSGSHHSHTTSQGRSDASHGQSGSRSASRETRNEEQSGDGSRHSGSRHHEASTQADSSRHSQSGQGESAGSRRSRRQGSSVSQDSDSEAYPEDSERRSESASRNHHGSSREQSRDGSRHPGSSHRDTASHVQSSPVQSDSSTAKEHGHFSSLSQDSAYHSGIQSRGSPHSSSSYHYQSEGTERQKGQSGLVWRHGSYGSADYDYGESGFRHSQHGSVSYNSNPVVFKERSDICKASAFGKDHPRYYATYINKDPGLCGHSSDISKQLGFSQSQRYYYYE

SEQ ID NO: 153 - protein, 578 aa, Homo sapiens
MRQQDAPKPTPAACRCSGLARRVLTIAFALLILGLMTWAYAAGVPLASDRYGLLAFGLYGAFLSAHLVAQSLFAYLEHRRVAAAARGPLDAATARSVALTISAYQEDPAYLRQCLASARALLYPRARLRVLMVVDGNRAEDLYMVDMFREVFADEDPATYVWDGNYHQPWEPAAAGAVGAGAYREVEAEDPGRLAVEALVRTRRCVCVAQRWGGKREVMYTAFKALGDSVDYVQVCDSDTRLDPMALLELVRVLDEDPRVGAVGGDVRILNPLDSWVSFLSSLRYWVAFNVERACQSYFHCVSCISGPLGLYRNNLLQQFLEAWYNQKFLGTHCTFGDDRHLTNRMLSMGYATKYTSRSRCYSETPSSFLRWLSQQTRWSKSYFREWLYNALWWHRHHAWMTYEAVVSGLFPFFVAATVLRLFYAGRPWALLWVLLCVQGVALAKAAFAAWLRGCLRMVLLSLYAPLYMCGLLPAKFLALVTMNQSGWGTSGRRKLAANYVPLLPLALWALLLLGGLVRSVAHEARADWSGPSRAAEAYHLAAGAGAYVGYWVAMLTLYWVGVRRLCRRRTGGYRVQV

SEQ ID NO: 154 - protein, 577 aa, Homo sapiens
MRQDAPKPTPAACRCSGLARRVLTIAFALLILGLMTWAYAAGVPLASDRYGLLAFGLYGAFLSAHLVAQSLFAYLEHRRVAAAARGPLDAATARSVALTISAYQEDPAYLRQCLASARALLYPRARLRVLMVVDGNRAEDLYMVDMFREVFADEDPATYVWDGNYHQPWEPAAAGAVGAGAYREVEAEDPGRLAVEALVRTRRCVCVAQRWGGKREVMYTAFKALGDSVDYVQVCDSDTRLDPMALLELVRVLDEDPRVGAVGGDVRILNPLDSWVSFLSSLRYWVAFNVERACQSYFHCVSCISGPLGLYRNNLLQQFLEAWYNQKFLGTHCTFGDDRHLTNRMLSMGYATKYTSRSRCYSETPSSFLRWLSQQTRWSKSYFREWLYNALWWHRHHAWMTYEAVVSGLFPFFVAATVLRLFYAGRPWALLWVLLCVQGVALAKAAFAAWLRGCLRMVLLSLYAPLYMCGLLPAKFLALVTMNQSGWGTSGRRKLAANYVPLLPLALWALLLLGGLVRSVAHEARADWSGPSRAAEAYHLAAGAGAYVGYWVAMLTLYWVGVRRLCRRRTGGYRVQV

SEQ ID NO: 155 - protein, 552 aa, Homo sapiens
MHCERFLCILRIIGTTLFGVSLLLGITAAYIVGYQFIQTDNYYFSFGLYGAFLASHLIIQSLFAFLEHRKMKKSLETPIKLNKTVALCIAAYQEDPDYLRKCLQSVKRLTYPGIKVVMVIDGNSEDDLYMMDIFSEVMGRDKSATYIWKNNFHEKGPGETDESHKESSQHVTQLVLSNKSICIMQKWGGKREVMYTAFRALGRSVDYVQVCDSDTMLDPASSVEMVKVLEEDPMVGGVGGDVQILNKYDSWISFLSSVRYWMAFNIERACQSYFGCVQCISGPLGMYRNSLLHEFVEDWYNQEFMGNQCSFGDDRHLTNRVLSLGYATKYTARSKCLTETPIEYLRWLNQQTRWSKSYFREWLYNAMWFHKHHLWMTYEAIITGFFPFFLIATVIQLFYRGKIWNILLFLLTVQLVGLIKSSFASCLRGNIVMVFMSLYSVLYMSSLLPAKMFAIATINKAGWGTSGRKTIVVNFIGLIPVSVWFTILLGGVIFTIYKESKRPFSESKQTVLIVGTLLYACYWVMLLTLYVVLINKCGRRKKGQQYDMVLDV

SEQ ID NO: 156 - protein, 553 aa, Homo sapiens
MPVQLTTALRVVGTSLFALAVLGGILAAYVTGYQFIHTEKHYLSFGLYGAILGLHLLIQSLFAFLEHRRMRRAGQALKLPSPRRGSVALCIAAYQEDPDYLRKCLRSAQRISFPDLKVVMVVDGNRQEDAYMLDIFHEVLGGTEQAGFFVWRSNFHEAGEGETEASLQEGMDRVRDVVRASTFSCIMQKWGGKREVMYTAFKALGDSVDYIQVCDSDTVLDPACTIEMLRVLEEDPQVGGVGGDVQILNKYDSWISFLSSVRYWMAFNVERACQSYFGCVQCISGPLGMYRNSLLQQFLEDWYHQKFLGSKCSFGDDRHLTNRVLSLGYRTKYTARSKCLTETPTKYLRWLNQQTRWSKSYFREWLYNSLWFHKHHLWMTYESVVTGFFPFFLIATVIQLFYRGRIWNILLFLLTVQLVGIIKATYACFLRGNAEMIFMSLYSLLYMSSLLPAKIFAIATINKSGWGTSGRKTIVVNFIGLIPVSIWVAVLLGGLAYTAYCQDLFSETELAFLVSGAILYGCYWVALLMLYLAIIARRCGKKPEQYSLAFAEV

SEQ ID NO: 157 - protein, 281 aa, Homo sapiens
MPVQLTTALRVVGTSLFALAVLGGILAAYVTGYQFIHTEKHYLSFGLYGAILGLHLLIQSLFAFLEHRRMRRAGQALKLPSPRRGSVALCIAAYQEDPDYLRKCLRSAQRISFPDLKVVMVVDGNRQEDAYMLDIFHEVLGGTEQAGFFVWRSNFHEAGEGETEASLQEGMDRVRDVVRASTFSCIMQKWGGKREVMYTAFKALGDSVDYIQVCDSDTVLDPACTIEMLRVLEEDPQVGGVGGDVQPPGKGMAVEDDQVQAAQVRATEAWSVHQRHVSREQ

SEQ ID NO: 158 - protein, 267 aa, Homo sapiens
MPRSCCSRSGALLLALLLQASMEVRGWCLESSQCQDLTTESNLLECIRACKPDLSAETPMFPGNGDEQPLTENPRKYVMGHFRWDRFGRRNSSSSGSSGAGQKREDVSAGEDCGPLPEGGPEPRSDGAKPGPREGKRSYSMEHFRWGKPVGKKRRPVKVYPNGAEDESAEAFPLEFKRELTGQRLREGDGPDGPADDGAGAQADLEHSLLVAAEKKDEGPYRMEHFRWGSPPKDKRYGGFMTSEKSQTPLVTLFKNAIIKNAYKKGE

SEQ ID NO: 159 - protein, 726 aa, Homo sapiens
MNHSPLKTALAYECFQDQDNSTLALPSDQKMKTGTSGRQRVQEQVMMTVKRQKSKSSQSSTLSHSNRGSMYDGLADNYNYGTTSRSSYYSKFQAGNGSWGYPIYNGTLKREPDNRRFSSYSQMENWSRHYPRGSCNTTGAGSDICFMQKIKASRSEPDLYCDPRGTLRKGTLGSKGQKTTQNRYSFYSTCSGQKAIKKCPVRPPSCASKQDPVYIPPISCNKDLSFGHSRASSKICSEDIECSGLTIPKAVQYLSSQDEKYQAIGAYYIQHTCFQDESAKQQVYQLGGICKLVDLLRSPNQNVQQAAAGALRNLVFRSTTNKLETRRQNGIREAVSLLRRTGNAEIQKQLTGLLWNLSSTDELKEELIADALPVLADRVIIPFSGWCDGNSNMSREVVDPEVFFNATGCLRNLSSADAGRQTMRNYSGLIDSLMAYVQNCVAASRCDDKSVENCMCVLHNLSYRLDAEVPTRYRQLEYNARNAYTEKSSTGCFSNKSDKMMNNNYDCPLPEEETNPKGSGWLYHSDAIRTYLNLMGKSKKDATLEACAGALQNLTASKGLMSSGMSQLIGLKEKGLPQIARLLQSGNSDVVRSGASLLSNMSRHPLLHRVMGNQVFPEVTRLLTSHTGNTSNSEDILSSACYTVRNLMASQPQLAKQYFSSSMLNNIINLCRSSASPKAAEAARLLLSDMWSSKELQGVLRQQGFDRNMLGTLAGANSLRNFTSRF

SEQ ID NO: 160 - protein, 747 aa, Homo sapiens
MNHSPLKTALAYECFQDQDNSTLALPSDQKMKTGTSGRQRVQEQVMMTVKRQKSKSSQSSTLSHSNRGSMYDGLADNYNYGTTSRSSYYSKFQAGNGSWGYPIYNGTLKREPDNRRFSSYSQMENWSRHYPRGSCNTTGAGSDICFMQKIKASRSEPDLYCDPRGTLRKGTLGSKGQKTTQNRYSFYSTCSGQKAIKKCPVRPPSCASKQDPVYIPPISCNKDLSFGHSRASSKICSEDIECSGLTIPKAVQYLSSQDEKYQAIGAYYIQHTCFQDESAKQQVYQLGGICKLVDLLRSPNQNVQQAAAGALRNLVFRSTTNKLETRRQNGIREAVSLLRRTGNAEIQKQLTGLLWNLSSTDELKEELIADALPVLADRVIIPFSGWCDGNSNMSREVVDPEVFFNATGCLRKRLGMRELLALVPQRATSSRVNLSSADAGRQTMRNYSGLIDSLMAYVQNCVAASRCDDKSVENCMCVLHNLSYRLDAEVPTRYRQLEYNARNAYTEKSSTGCFSNKSDKMMNNNYDCPLPEEETNPKGSGWLYHSDAIRTYLNLMGKSKKDATLEACAGALQNLTASKGLMSSGMSQLIGLKEKGLPQIARLLQSGNSDVVRSGASLLSNMSRHPLLHRVMGNQVFPEVTRLLTSHTGNTSNSEDILSSACYTVRNLMASQPQLAKQYFSSSMLNNIINLCRSSASPKAAEAARLLLSDMWSSKELQGVLRQQGFDRNMLGTLAGANSLRNFTSRF

SEQ ID NO: 161 - protein, 341 aa, Homo sapiens
MNIVVEFFVVTFKVLWAFVLAAARWLVRPKEKSVAGQVCLITGAGSGLGRLFALEFARRRALLVLWDINTQSNEETAGMVRHIYRDLEAADAAALQAGNGEEEILPHCNLQVFTYTCDVGKRENVYLTAERVRKEVGEVSVLVNNAGVVSGHHLLECPDELIERTMMVNCHAHFWTTKAFLPTMLEINHGHIVTVASSLGLFSTAGVEDYCASKFGVVGFHESLSHELKAAEKDGIKTTLVCPYLVDTGMFRGCRIRKEIEPFLPPLKPDYCVKQAMKAILTDQPMICTPRLMYIVTFMKSILPFEAVVCMYRFLGADKCMYPFIAQRKQATNNNEAKNGI

SEQ ID NO: 162 - protein, 307 aa, Homo sapiens
MGGLTASDVHPTLGVQLFSAGIAACLADVITFPLDTAKVRLQVQGECPTSSVIRYKGVLGTITAVVKTEGRMKLYSGLPAGLQRQISSASLRIGLYDTVQEFLTAGKETAPSLGSKILAGLTTGGVAVFIGQPTEVVKVRLQAQSHLHGIKPRYTGTYNAYRIIATTEGLTGLWKGTTPNLMRSVIINCTELVTYDLMKEAFVKNNILADDVPCHLVSALIAGFCATAMSSPVDVVKTRFINSPPGQYKSVPNCAMKVFTNEGPTAFFKGLVPSFLRLGSWNVIMFVCFEQLKRELSKSRQTMDCAT

SEQ ID NO: 163 - protein, 529 aa, Homo sapiens [sequence omitted]

SEQ ID NO: 164 - protein, 193 aa, Homo sapiens
MGVHECPAWLWLLLSLLSLPLGLPVLGAPPRLICDSRVLERYLLEAKEAENITTGCAEHCSLNENITVPDTKVNFYAWKRMEVGQQAVEVWQGLALLSEAVLRGQALLVNSSQPWEPLQLHVDKAVSGLRSLTTLLRALGAQKEAISPPDAASAAPLRTITADTFRKLFRVYSNFLRGKLKLYTGEACRTGDR

SEQ ID NO: 165 - protein, 166 aa, Homo sapiens
APPRLICDSRVLERYLLEAKEAENITTGCAEHCSLNENITVPDTKVNFYAWKRMEVGQQAVEVWQGLALLSEAVLRGQALLVNSSQPWEPLQLHVDKAVSGLRSLTTLLRALGAQKEAISPPDAASAAPLRTITADTFRKLFRVYSNFLRGKLKLYTGEACRTGDR

SEQ ID NO: 166 - protein, 193 aa, Homo sapiens
MGVHECPAWLWLLLSLLSLPLGLPVLGAPPRLICDSRVLERYLLEAKEAENITTGCNETCSLNENITVPDTKVNFYAWKRMEVGQQAVEVWQGLALLSEAVLRGQALLVNSSQVNETLQLHVDKAVSGLRSLTTLLRALGAQKEAISPPDAASAAPLRTITADTFRKLFRVYSNFLRGKLKLYTGEACRTGDR

SEQ ID NO: 167 - protein, 166 aa, Homo sapiens
APPRLICDSRVLERYLLEAKEAENITTGCNETCSLNENITVPDTKVNFYAWKRMEVGQQAVEVWQGLALLSEAVLRGQALLVNSSQVNETLQLHVDKAVSGLRSLTTLLRALGAQKEAISPPDAASAAPLRTITADTFRKLFRVYSNFLRGKLKLYTGEACRTGDR

SEQ ID NO: 168 - RNA, 794 nt, Homo sapiens
uaauacgacucacuauagggacauuugcuucugacacaacuguguucacuagcaaccucaaacagcuagccaccaugggggugcacgaauguccugccuggcuguggcuucuccugucccugcugucgcucccucugggccucccaguccugggcgccccaccacgccucaucugugacagccgaguccuggagagguaccucuuggaggccaaggaggccgagaauaucacgacgggcuguaaugaaaccugcagcuugaaugagaauaucacugucccagacaccaaaguuaauuucuaugccuggaagaggauggaggucgggcagcaggccguagaagucuggcagggccuggcccugcugucggaagcuguccugcggggccaggcccuguuggucaacucuucccaggugaacgagacccugcagcugcauguggauaaagccgucaguggccuucgcagccucaccacucugcuucgggcucugggagcccagaaggaagccaucuccccuccagaugcggccucagcugcuccacuccgaacaaucacugcugacacuuuccgcaaacucuuccgagucuacuccaauuuccuccggggaaagcugaagcuguacacaggggaggccugcaggacaggggacagaugaaccggugcucgcuuucuugcuguccaauuucuauuaaagguuccuuuguucccuaaguccaacuacuaaacugggggauauuaugaagggccuugagcaucuggauucugccuaauaaaaaacauuuauuuucauugc

SEQ ID NO: 169 - protein, 986 aa, Homo sapiens
MPGVARLPLLLGLLLLPRPGRPLDLADYTYDLAEEDDSEPLNYKDPCKAAAFLGDIALDEEDLRAFQVQQAVDLRRHTARKSSIKAAVPGNTSTPSCQSTNGQPQRGACGRWRGRSRSRRAATSRPERVWPDGVIPFVIGGNFTGSQRAVFRQAMRHWEKHTCVTFLERTDEDSYIVFTYRPCGCCSYVGRRGGGPQAISIGKNCDKFGIVVHELGHVVGFWHEHTRPDRDRHVSIVRENIQPGQEYNFLKMEPQEVESLGETYDFDSIMHYARNTFSRGIFLDTIVPKYEVNGVKPPIGQRTRLSKGDIAQARKLYKCPACGETLQDSTGNFSSPEYPNGYSAHMHCVWRISVTPGEKIILNFTSLDLYRSRLCWYDYVEVRDGFWRKAPLRGRFCGSKLPEPIVSTDSRLWVEFRSSSNWVGKGFFAVYEAICGGDVKKDYGHIQSPNYPDDYRPSKVCIWRIQVSEGFHVGLTFQSFEIERHDSCAYDYLEVRDGHSESSTLIGRYCGYEKPDDIKSTSSRLWLKFVSDGSINKAGFAVNFFKEVDECSRPNRGGCEQRCLNTLGSYKCSCDPGYELAPDKRRCEAACGGFLTKLNGSITSPGWPKEYPPNKNCIWQLVAPTQYRISLQFDFFETEGNDVCKYDFVEVRSGLTADSKLHGKFCGSEKPEVITSQYNNMRVEFKSDNTVSKKGFKAHFFSDKDECSKDNGGCQQDCVNTFGSYECQCRSGFVLHDNKHDCKEAGCDHKVTSTSGTITSPNWPDKYPSKKECTWAISSTPGHRVKLTFMEMDIESQPECAYDHLEVFDGRDAKAPVLGRFCGSKKPEPVLATGSRMFLRFYSDNSVQRKGFQASHATECGGQVRADVKTKDLYSHAQFGDNNYPGGVDCEWVIVAEEGYGVELVFQTFEVEEETDCGYDYMELFDGYDSTAPRLGRYCGSGPPEEVYSAGDSVLVKFHSDDTITKKGFHLRYTSTKFQDTLHSRK

SEQ ID NO: 170 - protein, 396 aa, Homo sapiens
MVAGTRCLLALLLPQVLLGGAAGLVPELGRRKFAAASSGRPSSQPSDEVLSEFELRLLSMFGLKQRPTPSRDAVVPPYMLDLYRRHSGQPGSPAPDHRLERAASRANTVRSFHHEESLEELPETSGKTTRRFFFNLSSIPTEEFITSAELQVFREQMQDALGNNSSFHHRINIYEIIKPATANSKFPVTRLLDTRLVNQNASRWESFDVTPAVMRWTAQGHANHGFVVEVAHLEEKQGVSKRHVRISRSLHQDEHSWSQIRPLLVTFGHDGKGHPLHKREKRQAKHKQRKRLKSSCKRHPLYVDFSDVGWNDWIVAPPGYHAFYCHGECPFPLADHLNSTNHAIVQTLVNSVNSKIPKACCVPTELSAISMLYLDENEKVVLKNYQDMVVEGCGCR

SEQ ID NO: 171 - protein, 408 aa, Homo sapiens
MIPGNRMLMVVLLCQVLLGGASHASLIPETGKKKVAEIQGHAGGRRSGQSHELLRDFEATLLQMFGLRRRPQPSKSAVIPDYMRDLYRLQSGEEEEEQIHSTGLEYPERPASRANTVRSFHHEEHLENIPGTSENSAFRFLFNLSSIPENEVISSAELRLFREQVDQGPDWERGFHRINIYEVMKPPAEVVPGHLITRLLDTRLVHHNVTRWETFDVSPAVLRWTREKQPNYGLAIEVTHLHQTRTHQGQHVRISRSLPQGSGNWAQLRPLLVTFGHDGRGHALTRRRRAKRSPKHHSQRARKKNKNCRRHSLYVDFSDVGWNDWIVAPPGYQAFYCHGDCPFPLADHLNSTNHAIVQTLVNSVNSSIPKACCVPTELSAISMLYLDEYDKVVLKNYQEMVVEGCGCR

SEQ ID NO: 172 - protein, 408 aa, Homo sapiens; identical to SEQ ID NO: 171

SEQ ID NO: 173 - protein, 454 aa, Homo sapiens
MHLTVFLLKGIVGFLWSCWVLVGYAKGGLGDNHVHSSFIYRRLRNHERREIQREILSILGLPHRPRPFSPGKQASSAPLFMLDLYNAMTNEENPEESEYSVRASLAEETRGARKGYPASPNGYPRRIQLSRTTPLTTQSPPLASLHDTNFLNDADMVMSFVNLVERDKDFSHQRRHYKEFRFDLTQIPHGEAVTAAEFRIYKDRSNNRFENETIKISIYQIIKEYTNRDADLFLLDTRKAQALDVGWLVFDITVTSNHWVINPQNNLGLQLCAETGDGRSINVKSAGLVGRQGPQSKQPFMVAFFKASEVLLRSVRAANKRKNQNRNKSSSHQDSSRMSSVGDYNTSEQKQACKKHELYVSFRDLGWQDWIIAPEGYAAFYCDGECSFPLNAHMNATNHAIVQTLVHLMFPDHVPKPCCAPTKLNAISVLYFDDSSNVILKKYRNMVVRSCGCH

SEQ ID NO: 174 - protein, 513 aa, Homo sapiens
MPGLGRRAQWLCWWWGLLCSCCGPPPLRPPLPAAAAAAAGGQLLGDGGSPGRTEQPPPSPQSSSGFLYRRLKTQEKREMQKEILSVLGLPHRPRPLHGLQQPQPPALRQQEEQQQQQQLPRGEPPPGRLKSAPLFMLDLYNALSADNDEDGASEGERQQSWPHEAASSSQRRQPPPGAAHPLNRKSLLAPGSGSGGASPLTSAQDSAFLNDADMVMSFVNLVEYDKEFSPRQRHHKEFKFNLSQIPEGEVVTAAEFRIYKDCVMGSFKNQTFLISIYQVLQEHQHRDSDLFLLDTRVVWASEEGWLEFDITATSNLWVVTPQHNMGLQLSVVTRDGVHVHPRAAGLVGRDGPYDKQPFMVAFFKVSEVHVRTTRSASSRRRQQSRNRSTQSQDVARVSSASDYNSSELKTACRKHELYVSFQDLGWQDWIIAPKGYAANYCDGECSFPLNAHMNATNHAIVQTLVHLMNPEYVPKPCCAPTKLNAISVLYFDDNSNVILKKYRNMVVRACGCH

SEQ ID NO: 175 - protein, 431 aa, Homo sapiens
MHVRSLRAAAPHSFVALWAPLFLLRSALADFSLDNEVHSSFIHRRLRSQERREMQREILSILGLPHRPRPHLQGKHNSAPMFMLDLYNAMAVEEGGGPGGQGFSYPYKAVFSTQGPPLASLQDSHFLTDADMVMSFVNLVEHDKEFFHPRYHHREFRFDLSKIPEGEAVTAAEFRIYKDYIRERFDNETFRISVYQVLQEHLGRESDLFLLDSRTLWASEEGWLVFDITATSNHWVVNPRHNLGLQLSVETLDGQSINPKLAGLIGRHGPQNKQPFMVAFFKATEVHFRSIRSTGSKQRSQNRSKTPKNQEALRMANVAENSSSDQRQACKKHELYVSFRDLGWQDWIIAPEGYAAYYCEGECAFPLNSYMNATNHAIVQTLVHFINPETVPKPCCAPTQLNAISVLYFDDSSNVILKKYRNMVVRACGCH

SEQ ID NO: 176 - protein, 402 aa, Homo sapiens
MTALPGPLWLLGLALCALGGGGPGLRPPPGCPQRRLGARERRDVQREILAVLGLPGRPRPRAPPAASRLPASAPLFMLDLYHAMAGDDDEDGAPAERRLGRADLVMSFVNMVERDRALGHQEPHWKEFRFDLTQIPAGEAVTAAEFRIYKVPSIHLLNRTLHVSMFQVVQEQSNRESDLFFLDLQTLRAGDEGWLVLDVTAASDCWLLKRHKDLGLRLYVETEDGHSVDPGLAGLLGQRAPRSQQPFVVTFFRASPSPIRTPRAVRPLRRRQPKKSNELPQANRLPGIFDDVHGSHGRQVCRRHELYVSFQDLGWLDWVIAPQGYSAYYCEGECSFPLDSCMNATNHAILQSLVHLMMPDAVPKACCAPTKLSATSVLYYDSSNNVILRKHRNMVVKACGCH

SEQ ID NO: 177 - protein, 372 aa, Homo sapiens
MPPPQQGPCGHHLLLLLALLLPSLPLTRAPVPPGPAAALLQALGLRDEPQGAPRLRPVPPVMWRLFRRRDPQETRSGSRRTSPGVTLQPCHVEELGVAGNIVRHIPDRGAPTRASEPASAAGHCPEWTVVFDLSAVEPAERPSRARLELRFAAAAAAAPEGGWELSVAQAGQGAGADPGPVLLRQLVPALGPPVRAELLGAAWARNASWPRSLRLALALRPRAPAACARLAEASLLLVTLDPRLCHPLARPRRDAEPVLGGGPGGACRARRLYVSFREVGWHRWVIAPRGFLANYCQGQCALPVALSGSGGPPALNHAVLRALMHAAAPGAADLPCCVPARLSPISVLFFDNSDNVVLRQYEDMVVDECGCR

SEQ ID NO: 178 - protein, 429 aa, Homo sapiens
MCPGALWVALPLLSLLAGSLQGKPLQSWGRGSAGGNAHSPLGVPGGGLPEHTFNLKMFLENVKVDFLRSLNLSGVPSQDKTRVEPPQYMIDLYNRYTSDKSTTPASNIVRSFSMEDAISITATEDFPFQKHILLFNISIPRHEQITRAELRLYVSCQNHVDPSHDLKGSVVIYDVLDGTDAWDSATETKTFLVSQDIQDEGWETLEVSSAVKRWVRSDSTKSKNKLEVTVESHRKGCDTLDISVPPGSRNLPFFVVFSNDHSSGTKETRLELREMISHEQESVLKKLSKDGSTEAGESSHEEDTDGHVAAGSTLARRKRSAGAGSHCQKTSLRVNFEDIGWDSWIIAPKEYEAYECKGGCFFPLADDVTPTKHAIVQTLVHLKFPTKVGKACCVPTKLSPISVLYKDDMGVPTLKYHYEGMSVAECGCR

SEQ ID NO: 179 - protein, 424 aa, Homo sapiens
MGSLVLTLCALFCLAAYLVSGSPIMNLEQSPLEEDMSLFGDVFSEQDGVDFNTLLQSMKDEFLKTLNLSDIPTQDSAKVDPPEYMLELYNKFATDRTSMPSANIIRSFKNEDLFSQPVSFNGLRKYPLLFNVSIPHHEEVIMAELRLYTLVQRDRMIYDGVDRKITIFEVLESKGDNEGERNMLVLVSGEIYGTNSEWETFDVTDAIRRWQKSGSSTHQLEVHIESKHDEAEDASSGRLEIDTSAQNKHNPLLIVFSDDQSSDKERKEELNEMISHEQLPELDNLGLDSFSSGPGEEALLQMRSNIIYDSTARIRRNAKGNYCKRTPLYIDFKEIGWDSWIIAPPGYEAYECRGVCNYPLAEHLTPTKHAIIQALVHLKNSQKASKACCVPTKLEPISILYLDKGVVTYKFKYEGMAVSECGCR

SEQ ID NO: 180 - protein, 450 aa, Homo sapiens
MDLSAAAALCLWLLSACRPRDGLEAAAVLRAAGAGPVRSPGGGGGGGGGGRTLAQAAGAAAVPAAAVPRARAARRAAGSGFRNGSVVPHHFMMSLYRSLAGRAPAGAAAVSASGHGRADTITGFTDQATQDESAAETGQSFLFDVSSLNDADEVVGAELRVLRRGSPESGPGSWTSPPLLLLSTCPGAARAPRLLYSRAAEPLVGQRWEAFDVADAMRRHRREPRPPRAFCLLLRAVAGPVPSPLALRRLGFGWPGGGGSAAEERAVLVVSSRTQRKESLFREIRAQARALGAALASEPLPDPGTGTASPRAVIGGRRRRRTALAGTRTAQGSGGGAGRGHGRRGRSRCSRKPLHVDFKELGWDDWIIAPLDYEAYHCEGLCDFPLRSHLEPTNHAIIQTLLNSMAPDAAPASCCVPARLSPISILYIDAANNVVYKQYEDMVVEACGCR

SEQ ID NO: 181 - protein, 392 aa, Homo sapiens
MVLLSILRILFLCELVLFMEHRAQMAEGGQSSIALLAEAPTLPLIEELLEESPGEQPRKPRLLGHSLRYMLELYRRSADSHGHPRENRTIGATMVRLVKPLTNVARPHRGTWHIQILGFPLRPNRGLYQLVRATVVYRHHLQLTRFNLSCHVEPWVQKNPTNHFPSSEGDSSKPSLMSNAWKEMDITQLVQQRFWNNKGHRILRLRFMCQQQKDSGGLELWHGTSSLDIAFLLLYFNDTHKSIRKAKFLPRGMEEFMERESLLRRTRQADGISAEVTASSSKHSGPENNQCSLHPFQISFRQLGWDHWIIAPPFYTPNYCKGTCLRVLRDGLNSPNHAIIQNLINQLVDQSVPRPSCVPYKYVPISVLMIEANGSILYKEYEGMIAESCTCR

SEQ ID NO: 182 - protein, 366 aa, Homo sapiens [sequence omitted]

SEQ ID NO: 183 - protein, 366 aa, Homo sapiens
MWPLWLCWALWVLPLAGPGAALTEEQLLGSLLRQLQLSEVPVLDRADMEKLVIPAHVRAQYVVLLRRSHGDRSRGKRFSQSFREVAGRFLASEASTHLLVFGMEQRLPPNSELVQAVLRLFQEPVPKAALHRHGRLSPRSAQARVTVEWLRVRDDGSNRTSLIDSRLVSVHESGWKAFDVTEAVNFWQQLSRPRQPLLLQVSVQREHLGPLASGAHKLVRFASQGAPAGLGEPQLELHTLDLRDYGAQGDCDPEAPMTEGTRCCRQEMYIDLQGMKWAKNWVLEPPGFLAYECVGTCQQPPEALAFNWPFLGPRQCIASETASLPMIVSIKEGGRTRPQVVSLPNMRVQKCSCASDGALVPRRLQP

SEQ ID NO: 184 - protein, 366 aa, Homo sapiens
MVLHLLLFLLLTPQGGHSCQGLELARELVLAKVRALFLDALGPPAVTREGGDPGVRRLPRRHALGGFTHRGSEPEEEEDVSQAILFPATDASCEDKSAARGLAQEAEEGLFRYMFRPSQHTRSRQVTSAQLWFHTGLDRQGTAASNSSEPLLGLLALSPGGPVAVPMSLGHAPPHWAVLHLATSALSLLTHPVLVLLLRCPLCTCSARPEATPFLVAHTRTRPPSGGERARRSTPLMSWPWSPSALRLLQRPPEEPAAHANCHRVALNISFQELGWERWIVYPPSFIFHYCHGGCGLHIPPNLSLPVPGAPPTPAQPYSLLPGAQPCCAALPGTMRPLHVRTTSDGGYSFKYETVPNLLTQHCACI

SEQ ID NO: 185 - protein, 426 aa, Homo sapiens
MPLLWLRGFLLASCWIIVRSSPTPGSEGHSAAPDCPSCALAALPKDVPNSQPEMVEAVKKHILNMLHLKKRPDVTQPVPKAALLNAIRKLHVGKVGENGYVEIEDDIGRRAEMNELMEQTSEIITFAESGTARKTLHFEISKEGSDLSVVERAEVWLFLKVPKANRTRTKVTIRLFQQQKHPQGSLDTGEEAEEVGLKGERSELLLSEKVVDARKSTWHVFPVSSSIQRLLDQGKSSLDVRIACEQCQESGASLVLLGKKKKKEEEGEGKKKGGGEGGAGADEEKEQSHRPFLMLQARQSEDHPHRRRRRGLECDGKVNICCKKQFFVSFKDIGWNDWIIAPSGYHANYCEGECPSHIAGTSGSSLSFHSTVINHYRMRGHSPFANLKSCCVPTKLRPMSMLYYDDGQNIIKKDIQNMIVEECGCS

SEQ ID NO: 186 - protein, 407 aa, Homo sapiens
MDGLPGRALGAACLLLLAAGWLGPEAWGSPTPPPTPAAPPPPPPPGSPGGSQDTCTSCGGFRRPEELGRVDGDFLEAVKRHILSRLQMRGRPNITHAVPKAAMVTALRKLHAGKVREDGRVEIPHLDGHASPGADGQERVSEIISFAETDGLASSRVRLYFFISNEGNQNLFVVQASLWLYLKLLPYVLEKGSRRKVRVKVYFQEQGHGDRWNMVEKRVDLKRSGWHTFPLTEAIQALFERGERRLNLDVQCDSCQELAVVPVFVDPGEESHRPFVVVQARLGDSRHRIRKRGLECDGRTNLCCRQQFFIDFRLIGWNDWIIAPTGYYGNYCEGSCPAYLAGVPGSASSFHTAVVNQYRMRGLNPGTVNSCCIPTKLSTMSMLYFDDEYNIVKRDVPNMIVEECGCA

SEQ ID NO: 187 - protein, 267 aa, Homo sapiens
MHLLLFQLLVLLPLGKTTRHQDGRQNQSSLSPVLLPRNQRELPTGNHEEAEEKPDLFVAVPHLVATSPAGEGQRQREKMLSRFGRFWKKPEREMHPSRDSDSEPFPPGTQSLIQPIDGMKMEKSPLREEAKKFWHHFMFRKTPASQGVILPIKSHEVHWETCRTVPFSQTITHEGCEKVVVQNNLCFGKCGSVHFPGAAQHSHTSCSHCLPAKFTTMHLPLNCTELSSVIKVVMLVEECQCKVKTEHEDGHILHAGSQDSFIPGVSA

SEQ ID NO: 188 - protein, 1038 aa, Homo sapiens
MTSSLQRPWRVPWLPWTILLVSTAAASQNQERLCAFKDPYQQDLGIGESRISHENGTILCSKGSTCYGLWEKSKGDINLVKQGCWSHIGDPQECHYEECVVTTTPPSIQNGTYRFCCCSTDLCNVNFTENFPPPDTTPLSPPHSFNRDETIIIALASVSVLAVLIVALCFGYRMLTGDRKQGLHSMNMMEAAASEPSLDLDNLKLLELIGRGRYGAVYKGSLDERPVAVKVFSFANRQNFINEKNIYRVPLMEHDNIARFIVGDERVTADGRMEYLLVMEYYPNGSLCKYLSLHTSDWVSSCRLAHSVTRGLAYLHTELPRGDHYKPAISHRDLNSRNVLVKNDGTCVISDFGLSMRLTGNRLVRPGEEDNAAISEVGTIRYMAPEVLEGAVNLRDCESALKQVDMYALGLIYWEIFMRCTDLFPGESVPEYQMAFQTEVGNHPTFEDMQVLVSREKQRPKFPEAWKENSLAVRSLKETIEDCWDQDAEARLTAQCAEERMAELMMIWERNKSVSPTVNPMSTAMQNERNLSHNRRVPKIGPYPDYSSSSYIEDSIHHTDSIVKNISSEHSMSSTPLTIGEKNRNSINYERQQAQARIPSPETSVTSLSTNTTTTNTTGLTPSTGMTTISEMPYPDETNLHTTNVAQSIGPTPVCLQLTEEDLETNKLDPKEVDKNLKESSDENLMEHSLKQFSGPDPLSSTSSSLLYPLIKLAVEATGQQDFTQTANGQACLIPDVLPTQIYPLPKQQNLPKRPTSLPLNTKNSTKEPRLKFGSKHKSNLKQVETGVAKMNTINAAEPHVVTVTMNGVAGRNHSVNSHAATTQYANGTVLSGQTTNIVTHRAQEMLQNQFIGEDTRLNINSSPDEHEPLLRREQQAGHDEGVLDRLVDRRERPLEGGRTNSNNNNSNPCSEQDVLAQGVPSTAADPGPSKPRRAQRPNSLDLSATNVLDGSSIQIGESTQDGKSGSGEKIKKRVKTPYSLKRWRPSTWVISTESLDCEVNNNGSNRAVHSKSSTAVYLAEGGTATTMVSKDIGMNCL

SEQ ID NO: 189 - protein, 794 aa, Homo sapiens
MELRPWLLWVVAATGTLVLLAADAQGQKVFTNTWAVRIPGGPAVANSVARKHGFLNLGQIFGDYYHFWHRGVTKRSLSPHRPRHSRLQREPQVQWLEQQVAKRRTKRDVYQEPTDPKFPQQWYLSGVTQRDLNVKAAWAQGYTGHGIVVSILDDGIEKNHPDLAGNYDPGASFDVNDQDPDPQPRYTQMNDNRHGTRCAGEVAAVANNGVCGVGVAYNARIGGVRMLDGEVTDAVEARSLGLNPNHIHIYSASWGPEDDGKTVDGPARLAEEAFFRGVSQGRGGLGSIFVWASGNGGREHDSCNCDGYTNSIYTLSISSATQFGNVPWYSEACSSTLATTYSSGNQNEKQIVTTDLRQKCTESHTGTSASAPLAAGIIALTLEANKNLTWRDMQHLVVQTSKPAHLNANDWATNGVGRKVSHSYGYGLLDAGAMVALAQNWTTVAPQRKCIIDILTEPKDIGKRLEVRKTVTACLGEPNHITRLEHAQARLTLSYNRRGDLAIHLVSPMGTRSTLLAARPHDYSADGFNDWAFMTTHSWDEDPSGEWVLEIENTSEANNYGTLTKFTLVLYGTAPEGLPVPPESSGCKTLTSSQACVVCEEGFSLHQKSCVQHCPPGFAPQVLDTHYSTENDVETIRASVCAPCHASCATCQGPALTDCLSCPSHASLDPVEQTCSRQSQSSRESPPQQQPPRLPPEVEAGQRLRAGLLPSHLPEVVAGLSCAFIVLVFVTVFLVLQLRSGFSFRGVKVYTMDRGLISYKGLPPEAWQEECPSDSEEDEGRGERTAFIKDQSAL

SEQ ID NO: 190 - protein, 390 aa, Homo sapiens
MPPSGLRLLLLLLPLLWLLVLTPGRPAAGLSTCKTIDMELVKRKRIEAIRGQILSKLRLASPPSQGEVPPGPLPEAVLALYNSTRDRVAGESAEPEPEPEADYYAKEVTRVLMVETHNEIYDKFKQSTHSIYMFFNTSELREAVPEPVLLSRAELRLLRLKLKVEQHVELYQKYSNNSWRYLSNRLLAPSDSPEWLSFDVTGVVRQWLSRGGEIEGFRLSAHCSCDSRDNTLQVDINGFTTGRRGDLATIHGMNRPFLLLMATPLERAQHLQSSRHRRALDTNYCFSSTEKNCCVRQLYIDFRKDLGWKWIHEPKGYHANFCLGPCPYIWSLDTQYSKVLALYNQHNPGASAAPCCVPQALEPLPIVYYVGRKPKVEQLSNMIVRSCKCS

SEQ ID NO: 191 - protein, 414 aa, Homo sapiens; identical to SEQ ID NO: 110

SEQ ID NO: 192 - protein, 202 aa, Homo sapiens
MLVAGFLLALPPSWAAGAPRAGRRPARPRGCADRPEELLEQLYGRLAAGVLSAFHHTLQLGPREQARNASCPAGGRPADRRFRPPTNLRSVSPWAYRISYDPARYPRYLPEAYCLCRGCLTGLFGEEDVRFRSAPVYMPTVVLRRTPACAGGRSVYTEAYVTIPVGCTCVPEPEKDADSINSSIDKQGAKLLLGPNDAPAGP

SEQ ID NO: 193 - protein, 1821 aa, Homo sapiens
MRPRTKARSPGRALRNPWRGFLPLTLALFVGAGHAQRDPVGRYEPAGGDANRLRRPGGSYPAAAAAKVYSLFREQDAPVAGLQPVERAQPGWGSPRRPTEAEARRPSRAQQSRRVQPPAQTRRSTPLGQQQPAPRTRAAPALPRLGTPQRSGAAPPTPPRGRLTGRNVCGGQCCPGWTTANSTNHCIKPVCEPPCQNRGSCSRPQLCVCRSGFRGARCEEVIPDEEFDPQNSRLAPRRWAERSPNLRRSSAAGEGTLARAQPPAPQSPPAPQSPPAGTLSGLSQTHPSQQHVGLSRTVRLHPTATASSQLSSNALPPGPGLEQRDGTQQAVPLEHPSSPWGLNLTEKIKKIKIVFTPTICKQTCARGHCANSCERGDTTTLYSQGGHGHDPKSGFRIYFCQIPCLNGGRCIGRDECWCPANSTGKFCHLPIPQPDREPPGRGSRPRALLEAPLKQSTFTLPLSNQLASVNPSLVKVHIHHPPEASVQIHQVAQVRGGVEEALVENSVETRPPPWLPASPGHSLWDSNNIPARSGEPPRPLPPAAPRPRGLLGRCYLNTVNGQCANPLLELTTQEDCCGSVGAFWGVTLCAPCPPRPASPVIENGQLECPQGYKRLNLTHCQDINECLTLGLCKDAECVNTRGSYLCTCRPGLMLDPSRSRCVSDKAISMLQGLCYRSLGPGTCTLPLAQRITKQICCCSRVGKAWGSECEKCPLPGTEAFREICPAGHGYTYASSDIRLSMRKAEEEELARPPREQGQRSSGALPGPAERQPLRVVTDTWLEAGTIPDKGDSQAGQVTTSVTHAPAWVTGNATTPPMPEQGIAEIQEEQVTPSTDVLVTLSTPGIDRCAAGATNVCGPGTCVNLPDGYRCVCSPGYQLHPSQAYCTDDNECLRDPCKGKGRCINRVGSYSCFCYPGYTLATSGATQECQDINECEQPGVCSGGQCTNTEGSYHCECDQGYIMVRKGHCQDINECRHPGTCPDGRCVNSPGSYTCLACEEGYRGQSGSCVDVNECLTPGVCAHGKCTNLEGSFRCSCEQGYEVTSDEKGCQDVDECASRASCPTGLCLNTEGSFACSACENGYWVNEDGTACEDLDECAFPGVCPSGVCTNTAGSFSCKDCDGGYRPSPLGDSCEDVDECEDPQSSCLGGECKNTVGSYQCLCPQGFQLANGTVCEDVNECMGEEHCAPHGECLNSHGSFFCLCAPGFVSAEGGTSCQDVDECATTDPCVGGHCVNTEGSFNCLCETGFQPSPESGECVDIDECEDYGDPVCGTWKCENSPGSYRCVLGCQPGFHMAPNGDCIDIDECANDTMCGSHGFCDNTDGSFRCLCDQGFEISPSGWDCVDVNECELMLAVCGAALCENVEGSFLCLCASDLEEYDAQEGHCRPRGAGGQSMSEAPTGDHAPAPTRMDCYSGQKGHAPCSSVLGRNTTQAECCCTQGASWGDACDLCPSEDSAEFSEICPSGKGYIPVEGAWTFGQTMYTDADECVIFGPGLCPNGRCLNTVPGYVCLCNPGFHYDASHKKCEDHDECQDLACENGECVNTEGSFHCFCSPPLTLDLSQQRCMNSTSSTEDLPDHDIHMDICWKKVTNDVCSEPLRGHRTTYTECCCQDGEAWSQQCALCPPRSSEVYAQLCNVARIEAEREAGVHFRPGYEYGPGPDDLHYSIYGPDGAPFYNYLGPEDTVPEPAFPNTAGHSADRTPILESPLQPSELQPHYVASHPEPPAGFEGLQAEECGILNGCENGRCVRVREGYTCDCFEGFQLDAAHMACVDVNECDDLNGPAVLCVHGYCENTEGSYRCHCSPGYVAEAGPPHCTAKE

SEQ ID NO: 194 - protein, 501 aa, Homo sapiens
MRLPKLLTFLLWYLAWLDLEFICTVLGAPDLGQRPQGTRPGLAKAEAKERPPLARNVFRPGGHSYGGGATNANARAKGGTGQTGGLTQPKKDEPKKLPPRPGGPEPKPGHPPQTRQATARTVTPKGQLPGGKAPPKAGSVPSSFLLKKAREPGPPREPKEPFRPPPITPHEYMLSLYRTLSDADRKGGNSSVKLEAGLANTITSFIDKGQDDRGPVVRKQRYVFDISALEKDGLLGAELRILRKKPSDTAKPAAPGGGRAAQLKLSSCPSGRQPASLLDVRSVPGLDGSGWEVFDIWKLFRNFKNSAQLCLELEAWERGRAVDLRGLGFDRAARQVHEKALFLVFGRTKKRDLFFNEIKARSGQDDKTVYEYLFSQRRKRRAPLATRQGKRPSKNLKARCSRKALHVNFKDMGWDDWIIAPLEYEAFHCEGLCEFPLRSHLEPTNHAVIQTLMNSMDPESTPPTCCVPTRLSPISILFIDSANNVVYKQYEDMVVESCGCR

SEQ ID NO: 195 - protein, 184 aa, Homo sapiens
MSRTAYTVGALLLLLGTLLPAAEGKKKGSQGAIPPPDKAQHNDSEQTQSPQQPGSRNRGRGQGRGTAMPGEEVLESSQEALHVTERKYLKRDWCKTQPLKQTIHEEGCNSRTIINRFCYGQCNSFYIPRHIRKEEGSFQSCSFCKPKKFTTMMVTLNCPELQPPTKKKRVTRVKQCRCISIDLD

SEQ ID NO: 196 - protein, 108 aa, Homo sapiens
MKALCLLLLPVLGLLVSSKTLCSMEEAINERIQEVAGSLIFRAISSIGLECQSVTSRGDLATCPRGFAVTGCTCGSACGSWDVRAETTCHCQCAGMDWTGARCCRVQP

SEQ ID NO: 197 - protein, 323 aa, Homo sapiens
MAYVPAPGYQPTYNPTLPYYQPIPGGLNVGMSVYIQGVASEHMKRFFVNFVVGQDPGSDVAFHFNPRFDGWDKVVFNTLQGGKWGSEERKRSMPFKKGAAFELVFIVLAEHYKVVVNGNPFYEYGHRLPLQMVTHLQVDGDLQLQSINFIGGQPLRPQGPPMMPPYPGPGHCHQQLNSLPTMEGPPTFNPPVPYFGRLQGGLTARRTIIIKGYVPPTGKSFAINFKVGSSGDIALHINPRMGNGTVVRNSLLNGSWGSEEKKITHNPFGPGQFFDLSIRCGLDRFKVYANGQHLFDFAHRLSAFQRVDTLEIQGDVTLSYVQI

SEQ ID NO: 198 - protein, 244 aa, Homo sapiens
MLLLGAVLLLLALPGHDQETTTQGPGVLLPLPKGACTGWMAGIPGHPGHNGAPGRDGRDGTPGEKGEKGDPGLIGPKGDIGETGVPGAEGPRGFPGIQGRKGEPGEGAYVYRSAFSVGLETYVTIPNMPIRFTKIFYNQQNHYDGSTGKFHCNIPGLYYFAYHITVYMKDVKVSLFKKDKAMLFTYDQYQENNVDQASGSVLLHLEVGDQVWLQVYGEGERNGLYADNDNDSTFTGFLLYHDTN

SEQ ID NO: 199 - protein, 245 aa, Homo sapiens
MDVGPSSLPHLGLKLLLLLLLLPLRGQANTGCYGIPGMPGLPGAPGKDGYDGLPGPKGEPGIPAIPGIRGPKGQKGEPGLPGHPGKNGPMGPPGMPGVPGPMGIPGEPGEEGRYKQKFQSVFTVTRQTHQPPAPNSLIRFNAVLTNPQGDYDTSTGKFTCKVPGLYYFVYHASHTANLCVLLYRSGVKVVTFCGHTSKTNQVNSGGVLLRLQVGEEVWLAVNDYYDMVGIQGSDSVFSGFLLFPD

SEQ ID NO: 200 - protein, 672 aa, Homo sapiens
MRAGRGATPARELFRDAAFPAADSSLFCDLSTPLAQFREDITWRRPQEICATPRLFPDDPREGQVKQGLLGDCWFLCACAALQKSRHLLDQVIPPGQPSWADQEYRGSFTCRIWQFGRWVEVTTDDRLPCLAGRLCFSRCQREDVFWLPLLEKVYAKVHGSYEHLWAGQVADALVDLTGGLAERWNLKGVAGSGGQQDRPGRWEHRTCRQLLHLKDQCLISCCVLSPRAGARELGEFHAFIVSDLRELQGQAGQCILLLRIQNPWGRRCWQGLWREGGEGWSQVDAAVASELLSQLQEGEFWVEEEEFLREFDELTVGYPVTEAGHLQSLYTERLLCHTRALPGAWVKGQSAGGCRNNSGFPSNPKFWLRVSEPSEVYIAVLQRSRLHAADWAGRARALVGDSHTSWSPASIPGKHYQAVGLHLWKVEKRRVNLPRVLSMPPVAGTACHAYDREVHLRCELSPGYYLAVPSTFLKDAPGEFLLRVFSTGRVSLSAIRAVAKNTTPGAALPAGEWGTVQLRGSWRVGQTAGGSRNFASYPTNPCFPFSVPEGPGPRCVRITLHQHCRPSDTEFHPIGFHIFQVPEGGRSQDAPPLLLQEPLLSCVPHRYAQEVSRLCLLPAGTYKVVPSTYLPDTEGAFTVTIATRIDRPSIHSQEMLGQFLQEVSIMAVMKT

SEQ ID NO: 201 - protein, 544 aa, Homo sapiens
MRAGRGATPARELFRDAAFPAADSSLFCDLSTPLAQFREDITWRRPQEICATPRLFPDDPREGQVKQGLLGDCWFLCACAALQKSRHLLDQVIPPGQPSWADQEYRGSFTCRIWQFGRWVEVTTDDRLPCLAGRLCFSRCQREDVFWLPLLEKVYAKVHGSYEHLWAGQVADALVDLTGGLAERWNLKGVAGSGGQQDRPGRWEHRTCRQLLHLKDQCLISCCVLSPRAGARELGEFHAFIVSDLRELQGQAGQCILLLRIQNPWGRRCWQGLWREGGEGWSQVDAAVASELLSQLQEGEFWVEEEEFLREFDELTVGYPVTEAGHLQSLYTERLLCHTRALPGAWVKGQSAGGCRNNSGFPSNPKFWLRVSEPSEVYIAVLQRSRLHAADWAGRARALVGDSHTSWSPASIPGKHYQAVGLHLWKVEKRRVNLPRVLSMPPVAGTACHAYDREVHLRCELSPGYYLAVPSTFLKDAPGEFLLRVFSTGRVSLRALAPAASASLCISTAGPVTPSSTPSASISSRSQRVEGARTHPHCCCRSRC

SEQ ID NO: 202 - protein, 517 aa, Homo sapiens
MRAGRGATPARELFRDAAFPAADSSLFCDLSTPLAQFREDITWRRPQEICATPRLFPDDPREGQVKQGLLGDCWFLCACAALQKSRHLLDQVIPPGQPSWADQEYRGSFTCRIWQFGRWVEVTTDDRLPCLAGRLCFSRCQREDVFWLPLLEKVYAKVHGSYEHLWAGQVADALVDLTGGLAERWNLKGVAGSGGQQDRPGRWEHRTCRQLLHLKDQCLISCCVLSPRAGARELGEFHAFIVSDLRELQGQAGQCILLLRIQNPWGRRCWQGLWREGGEGWSQVDAAVASELLSQLQEGEFWVEEEEFLREFDELTVGYPVTEAGHLQSLYTERLLCHTRALPGAWVKGQSAGGCRNNSGFPSNPKFWLRVSEPSEVYIAVLQRSRLHAADWAGRARALVGDSHTSWSPASIPGKHYQAVGLHLWKVPEGGRSQDAPPLLLQEPLLSCVPHRYAQEVSRLCLLPAGTYKVVPSTYLPDTEGAFTVTIATRIDRPSIHSQEMLGQFLQEVSIMAVMKT

SEQ ID NO: 203 - protein, 370 aa, Homo sapiens; identical to SEQ ID NO: 127

SEQ ID NO: 204 - protein, 281 aa, Homo sapiens
MQQPFNYPYPQIYWVDSSASSPWAPPGTVLPCPTSVPRRPGQRRPPPPPPPPPLPPPPPPPPLPPLPLPPLKKRGNHSTGLCLLVMFFMVLVALVGLGLGMFQLFHLQKELAELRESTSQMHTASSLEKQIGHPSPPPEKKELRKVAHLTGKSNSRSMPLEWEDTYGIVLLSGVKYKKGGLVINETGLYFVYSKVYFRGQSCNNLPLSHKVYMRNSKYPQDLVMMEGKMMSYCTTGQMWARSSYLGAVFNLTSADHLYVNVSELSLVNFEESQTFFGLYKL

SEQ ID NO: 205 - protein, 1447 aa, Homo sapiens
MASAGNAAEPQDRGGGGSGCIGAPGRPAGGGRRRRTGGLRRAAAPDRDYLHRPSYCDAAFALEQISKGKATGRKAPLWLRAKFQRLLFKLGCYIQKNCGKFLVVGLLIFGAFAVGLKAANLETNVEELWVEVGGRVSRELNYTRQKIGEEAMFNPQLMIQTPKEEGANVLTTEALLQHLDSALQASRVHVYMYNRQWKLEHLCYKSGELITETGYMDQIIEYLYPCLIITPLDCFWEGAKLQSGTAYLLGKPPLRWTNFDPLEFLEELKKINYQVDSWEEMLNKAEVGHGYMDRPCLNPADPDCPATAPNKNSTKPLDMALVLNGGCHGLSRKYMHWQEELIVGGTVKNSTGKLVSAHALQTMFQLMTPKQMYEHFKGYEYVSHINWNEDKAAAILEAWQRTYVEVVHQSVAQNSTQKVLSFTTTTLDDILKSFSDVSVIRVASGYLLMLAYACLTMLRWDCSKSQGAVGLAGVLLVALSVAAGLGLCSLIGISFNAATTQVLPFLALGVGVDDVFLLAHAFSETGQNKRIPFEDRTGECLKRTGASVALTSISNVTAFFMAALIPIPALRAFSLQAAVVVVFNFAMVLLIFPAILSMDLYRREDRRLDIFCCFTSPCVSRVIQVEPQAYTDTHDNTRYSPPPPYSSHSFAHETQITMQSTVQLRTEYDPHTHVYYTTAEPRSEISVQPVTVTQDTLSCQSPESTSSTRDLLSQFSDSSLHCLEPPCTKWTLSSFAEKHYAPFLLKPKAKVVVIFLFLGLLGVSLYGTTRVRDGLDLTDIVPRETREYDFIAAQFKYFSFYNMYIVTQKADYPNIQHLLYDLHRSFSNVKYVMLEENKQLPKMWLHYFRDWLQGLQDAFDSDWETGKIMPNNYKNGSDDGVLAYKLLVQTGSRDKPIDISQLTKQRLVDADGIINPSAFYIYLTAWVSNDPVAYAASQANIRPHRPEWVHDKADYMPETRLRIPAAEPIEYAQFPFYLNGLRDTSDFVEAIEKVRTICSNYTSLGLSSYPNGYPFLFWEQYIGLRHWLLLFISVVLACTFLVCAVFLLNPWTAGIIVMVLALMTVELFGMMGLIGIKLSAVPVVILIASVGIGVEFTVHVALAFLTAIGDKNRRAVLALEHMFAPVLDGAVSTLLGVLMLAGSEFDFIVRYFFAVLAILTILGVLNGLVLLPVLLSFFGPYPEVSPANGLNRLPTPSPEPPPSVVRFAMPPGHTHSGSDSSDSEYSSQTTVSGLSEELRHYEAQQGAGGPAHQVIVEATENPVFAHSTVVHPESRHHPPSNPRQQPHLDSGSLPPGRQGQQPRRDPPREGLWPPPYRPRRDAFEISTEGHSGPSNRARWGPRGARSHNPRNPASTAMGSSVPGYCQPITTVTASASVTVAVHPPPVPGPGRNPRGGLCPGYPETDHGLFEDPHVPFHVRCERRDSKVEVIELQDVECEERPRGSSSN

SEQ ID NO: 206 - protein, 1203 aa, Homo sapiens
MTRSPPLRELPPSYTPPARTAAPQILAGSLKAPLWLRAYFQGLLFSLGCGIQRHCGKVLFLGLLAFGALALGLRMAIIETNLEQLWVEVGSRVSQELHYTKEKLGEEAAYTSQMLIQTARQEGENILTPEALGLHLQAALTASKVQVSLYGKSWDLNKICYKSGVPLIENGMIERMIEKLFPCVILTPLDCFWEGAKLQGGSAYLPGRPDIQWTNLDPEQLLEELGPFASLEGFRELLDKAQVGQAYVGRPCLHPDDLHCPPSAPNHHSRQAPNVAHELSGGCHGFSHKFMHWQEELLLGGMARDPQGELLRAEALQSTFLLMSPRQLYEHFRGDYQTHDIGWSEEQASTVLQAWQRRFVQLAQEALPENASQQIHAFSSTTLDDILHAFSEVSAARVVGGYLLMLAYACVTMLRWDCAQSQGSVGLAGVLLVALAVASGLGLCALLGITFNAATTQVLPFLALGIGVDDVFLLAHAFTEALPGTPLQERMGECLQRTGTSVVLTSINNMAAFLMAALVPIPALRAFSLQAAIVVGCTFVAVMLVFPAILSLDLRRRHCQRLDVLCCFSSPCSAQVIQILPQELGDGTVPVGIAHLTATVQAFTHCEASSQHVVTILPPQAHLVPPPSDPLGSELFSPGGSTRDLLGQEEETRQKAACKSLPCARWNLAHFARYQFAPLLLQSHAKAIVLVLFGALLGLSLYGATLVQDGLALTDVVPRGTKEHAFLSAQLRYFSLYEVALVTQGGFDYAHSQRALFDLHQRFSSLKAVLPPPATQAPRTWLHYYRNWLQGIQAAFDQDWASGRITRHSYRNGSEDGALAYKLLIQTGDAQEPLDFSQLTTRKLVDREGLIPPELFYMGLTVWVSSDPLGLAASQANFYPPPPEWLHDKYDTTGENLRIPPAQPLEFAQFPFLLRGLQKTADFVEAIEGARAACAEAGQAGVHAYPSGSPFLFWEQYLGLRRCFLLAVCILLVCTFLVCALLLLNPWTAGLIVLVLAMMTVELFGIMGFLGIKLSAIPVVILVASVGIGVEFTVHVALGFLTTQGSRNLRAAHALEHTFAPVTDGAISTLLGLLMLAGSHFDFIVRYFFAALTVLTLLGLLHGLVLLPVLLSILGPPPEVIQMYKESPEILSPPAPQGGGLRWGASSSLPQSFARVTTSMTVAIHPPPLPGAYIHPAPDEPPWSPAATSSGNLSSRGPGPATG

SEQ ID NO: 207 - protein, 375 aa, Homo sapiens
MDALQLANSAFAVDLFKQLCEKEPLGNVLFSPICLSTSLSLAQVGAKGDTANEIGQVLHFENVKDVPFGFQTVTSDVNKLSSFYSLKLIKRLYVDKSLNLSTEFISSTKRPYAKELETVDFKDKLEETKGQINNSIKDLTDGHFENILADNSVNDQTKILVVNAAYFVGKWMKKFSESETKECPFRVNKTDTKPVQMMNMEATFCMGNIDSINCKIIELPFQNKHLSMFILLPKDVEDESTGLEKIEKQLNSESLSQWTNPSTMANAKVKLSIPKFKVEKMIDPKACLENLGLKHIFSEDTSDFSGMSETKGVALSNVIHKVCLEITEDGGDSIEVPGARILQHKDELNADHPFIYIIRHNKTRNIIFFGKFCSP

SEQ ID NO: 208 - protein, 1754 aa, Homo sapiens
MAPYPCGCHILLLLFCCLAAARANLLNLNWLWFNNEDTSHAATTIPEPQGPLPVQPTADTTTHVTPRNGSTEPATAPGSPEPPSELLEDGQDTPTSAESPDAPEENIAGVGAEILNVAKGIRSFVQLWNDTVPTESLARAETLVLETPVGPLALAGPSSTPQENGTTLWPSRGIPSSPGAHTTEAGTLPAPTPSPPSLGRPWAPLTGPSVPPPSSGRASLSSLLGGAPPWGSLQDPDSQGLSPAAAAPSQQLQRPDVRLRTPLLHPLVMGSLGKHAAPSAFSSGLPGALSQVAVTTLTRDSGAWVSHVANSVGPGLANNSALLGADPEAPAGRCLPLPPSLPVCGHLGISRFWLPNHLHHESGEQVRAGARAWGGLLQTHCHPFLAWFFCLLLVPPCGSVPPPAPPPCCQFCEALQDACWSRLGGGRLPVACASLPTQEDGYCVLIGPAAERISEEVGLLQLLGDPPPQQVTQTDDPDVGLAYVFGPDANSGQVARYHFPSLFFRDFSLLFHIRPATEGPGVLFAITDSAQAMVLLGVKLSGVQDGHQDISLLYTEPGAGQTHTAASFRLPAFVGQWTHLALSVAGGFVALYVDCEEFQRMPLARSSRGLELEPGAGLFVAQAGGADPDKFQGVIAELKVRRDPQVSPMHCLDEEGDDSDGASGDSGSGLGDARELLREETGAALKPRLPAPPPVTTPPLAGGSSTEDSRSEEVEEQTTVASLGAQTLPGSDSVSTWDGSVRTPGGRVKEGGLKGQKGEPGVPGPPGRAGPPGSPCLPGPPGLPCPVSPLGPAGPALQTVPGPQGPPGPPGRDGTPGRDGEPGDPGEDGKPGDTGPQGFPGTPGDVGPKGDKGDPGVGERGPPGPQGPPGPPGPSFRHDKLTFIDMEGSGFGGDLEALRGPRGFPGPPGPPGVPGLPGEPGRFGVNSSDVPGPAGLPGVPGREGPPGFPGLPGPPGPPGREGPPGRTGQKGSLGEAGAPGHKGSKGAPGPAGARGESGLAGAPGPAGPPGPPGPPGPPGPGLPAGFDDMEGSGGPFWSTARSADGPQGPPGLPGLKGDPGVPGLPGAKGEVGADGVPGFPGLPGREGIAGPQGPKGDRGSRGEKGDPGKDGVGQPGLPGPPGPPGPVVYVSEQDGSVLSVPGPEGRPGFAGFPGPAGPKGNLGSKGERGSPGPKGEKGEPGSIFSPDGGALGPAQKGAKGEPGFRGPPGPYGRPGYKGEIGFPGRPGRPGMNGLKGEKGEPGDASLGFGMRGMPGPPGPPGPPGPPGTPVYDSNVFAESSRPGPPGLPGNQGPPGPKGAKGEVGPPGPPGQFPFDFLQLEAEMKGEKGDRGDAGQKGERGEPGGGGFFGSSLPGPPGPPGPPGPRGYPGIPGPKGESIRGQPGPPGPQGPPGIGYEGRQGPPGPPGPPGPPSFPGPHRQTISVPGPPGPPGPPGPPGTMGASSGVRLWATRQAMLGQVHEVPEGWLIFVAEQEELYVRVQNGFRKVQLEARTPLPRGTDNEVAALQPPVVQLHDSNPYPRREHPHPTARPWRADDILASPPRLPEPQPYPGAPHHSSYVHLRPARPTSPPAHSHRDFQPVLHLVALNSPLSGGMRGIRGADFQCFQQARAVGLAGTFRAFLSSRLQDLYSIVRRADRAAVPIVNLKDELLFPSWEALFSGSEGPLKPGARIFSFDGKDVLRHPTWPQKSVWHGSDPNGRRLTESYCETWRTEAPSATGQASSLLGGRLLGQSAASCHHAYIVLCIENSFMTASK

SEQ ID NO: 209 - protein, 155 aa, Homo sapiens; identical to SEQ ID NO: 106

SEQ ID NO: 210 - protein, 288 aa, Homo sapiens; identical to SEQ ID NO: 107

SEQ ID NO: 211 - protein, 239 aa, Homo sapiens
MGLIWLLLLSLLEPGWPAAGPGARLRRDAGGRGGVYEHLGGAPRRRKLYCATKYHLQLHPSGRVNGSLENSAYSILEITAVEVGIVAIRGLFSGRYLAMNKRGRLYASEHYSAECEFVERIHELGYNTYASRLYRTVSSTPGARRQPSAERLWYVSVNGKGRPRRGFKTRRTQKSSLFLPRVLDHRDHEMVRQLQSGLPRPPGKGVQPRRRRQKQSPDNLEPSHVQASRLGSQLEASAH

SEQ ID NO: 212 - protein, 206 aa, Homo sapiens
MSGPGTAAVALLPAVLLALLAPWAGRGGAAAPTAPNGTLEAELERRWESLVALSLARLPVAAQPKEAAVQSGAGDYLLGIKRLRRLYCNVGIGFHLQALPDGRIGGAHADTRDSLLELSPVERGVVSIFGVASRFFVAMSSKGKLYGSPFFTDECTFKEILLPNNYNAYESYKYPGMFIALSKNGKTKKGNRVSPTMKVTHFLPRL

SEQ ID NO: 213 - protein, 268 aa, Homo sapiens
MSLSFLLLLFFSHLILSAWAHGEKRLAPKGQPGPAATDRNPRGSSSRQSSSSAMSSSSASSSPAASLGSQGSGLEQSSFQWSPSGRRTGSLYCRVGIGFHLQIYPDGKVNGSHEANMLSVLEIFAVSQGIVGIRGVFSNKFLAMSKKGKLHASAKFTDDCKFRERFQENSYNTYASAIHRTEKTGREWYVALNKRGKAKRGCSPRVKPQHISTHFLPRFKQSEQPELSFTVTVPEKKKPPSPIKPKIPLSAPRKNTNSVKYRLKFRFG

SEQ ID NO: 214 - protein, 208 aa, Homo sapiens
MALGQKLFITMSRGAGRLQGTLWALVFLGILVGMVVPSPAGTRANNTLLDSRGWGTLLSRSRAGLAGEIAGVNWESGYLVGIKRQRRLYCNVGIGFHLQVLPDGRISGTHEENPYSLLEISTVERGVVSLFGVRSALFVAMNSKGRLYATPSFQEECKFRETLLPNNYNAYESDLYQGTYIALSKYGRVKRGSKVSPIMTVTHFLPRI

SEQ ID NO: 215 - protein, 233 aa, Homo sapiens
MGSPRSALSCLLLHLLVLCLQAQEGPGRGPALGRELASLFRAGREPQGVSQQHVREQSLVTDQLSRRLIRTYQLYSRTSGKHVQVLANKRINAMAEDGDPFAKLIVETDTFGSRVRVRGAETGLYICMNKKGKLIAKSNGKGKDCVFTEIVLENNYTALQNAKYEGWYMAFTRKGRPRKGSKTRQHQREVHFMKRLPRGHHTTEQSLRFEFLNYPPFTRSLRGSQRTWAPEPR

SEQ ID NO: 216 - protein, 208 aa, Homo sapiens
MAPLGEVGNYFGVQDAVPFGNVPVLPVDSPVLLSDHLGQSEAGGLPRGPAVTDLDHLKGILRRRQLYCRTGFHLEIFPNGTIQGTRKDHSRFGILEFISIAVGLVSIRGVDSGLYLGMNEKGELYGSEKLTQECVFREQFEENWYNTYSSNLYKHVDTGRRYYVALNKDGTPREGTRTKRHQKFTHFLPRPVDPDKVPELYKDILSQS

SEQ ID NO: 217 - protein, 243 aa, Homo sapiens
MAAAIASSLIRQKRQARESNSDRVSASKRRSSPSKDGRSLCERHVLGVFSKVRFCSGRKRPVRRRPEPQLKGIVTRLFSQQGYFLQMHPDGTIDGTKDENSDYTLFNLIPVGLRVVAIQGVKASLYVAMNGEGYLYSSDVFTPECKFKESVFENYYVIYSSTLYRQQESGRAWFLGLNKEGQIMKGNRVKKTKPSSHFVPKPIEVCMYREPSLHEIGEKQGRSRKSSGTPTMNGGKVVNQDST

SEQ ID NO: 218 - protein, 216 aa, Homo sapiens
MRSGCVVVHVWILAGLWLAVAGRPLAFSDAGPHVHYGWGDPIRLRHLYTSGPHGLSSCFLRIRADGVVDCARGQSAHSLLEIKAVALRTVAIKGVHSVRYLCMGADGKMQGLLQYSEEDCAFEEEIRPDGYNVYRSEKHRLPVSLSSAKQRQLYKNRGFLPLSHFLPMLPMVPEEPEDLRGHLESDMFSSPLETDSMDPFGLVTGLEAVRSPSFEK

SEQ ID NO: 219 - protein, 207 aa, Homo sapiens
MAEVGGVFASLDWDLHGFSSSLGNVPLADSPGFLNERLGQIEGKLQRGSPTDFAHLKGILRRRQLYCRTGFHLEIFPNGTVHGTRHDHSRFGILEFISLAVGLISIRGVDSGLYLGMNERGELYGSKKLTRECVFREQFEENWYNTYASTLYKHSDSERQYYVALNKDGSPREGYRTKRHQKFTHFLPRPVDPSKLPSMSRDLFHYR

SEQ ID NO: 220 - protein, 207 aa, Homo sapiens
MYSAPSACTCLCLHFLLLCFQVQVLVAEENVDFRIHVENQTRARDDVSRKQLRLYQLYSRTSGKHIQVLGRRISARGEDGDKYAQLLVETDTFGSQVRIKGKETEFYLCMNRKGKLVGKPDGTSKECVFIEKVLENNYTALMSAKYSGWYVGFTKKGRPRKGPKTRENQQDVHFMKRYPKGQPELQKPFKYTTVTKRSRRIRPTHPA

SEQ ID NO: 221 - protein, 235 aa, Homo sapiens
MTVLAPAWSPTTYLLLLLLLSSGLSGTQDCSFQHSPISSDFAVKIRELSDYLLQDYPVTVASNLQDEELCGGLWRLVLAQRWMERLKTVAGSKMQGLLERVNTEIHFVTKCAFQPPPSCLRFVQTNISRLLQETSEQLVALKPWITRQNFSRCLELQCQPDSSTLPPPWSPRPLEATAPTAPQPPLLLLLLLPVGLLLLAAAWCLHWQRTRRRTPRPGEQVPPVPSPQDLLLVEH

SEQ ID NO: 222 - protein, 110 aa, Homo sapiens
APMAEGGGQNHHEVVKFMDVYQRSYCHPIETLVDIFQEYPDEIEYIFKPSCVPLMRCGGCCNDEGLECVPTEESNITMQIMRIKPHQGQHIGEMSFLQHNKCECRPKKDR

SEQ ID NO: 223 - protein, 147 aa, Homo sapiens
MNFLLSWVHWSLALLLYLHHAKWSQAAPMAEGGGQNHHEVVKFMDVYQRSYCHPIETLVDIFQEYPDEIEYIFKPSCVPLMRCGGCCNDEGLECVPTEESNITMQIMRIKPHQGQHIGEMSFLQHNKCECRPKKDRARQEKCDKPRR

SEQ ID NO: 224 - protein, 145 aa, Homo sapiens
APMAEGGGQNHHEVVKFMDVYQRSYCHPIETLVDIFQEYPDEIEYIFKPSCVPLMRCGGCCNDEGLECVPTEESNITMQIMRIKPHQGQHIGEMSFLQHNKCECRPKKDRARQEKKSVRGKGKGQKRKRKKSRYKSWSVCDKPRR

SEQ ID NO: 225 - protein, 191 aa, Homo sapiens
MNFLLSWVHWSLALLLYLHHAKWSQAAPMAEGGGQNHHEVVKFMDVYQRSYCHPIETLVDIFQEYPDEIEYIFKPSCVPLMRCGGCCNDEGLECVPTEESNITMQIMRIKPHQGQHIGEMSFLQHNKCECRPKKDRARQENPCGPCSERRKHLFVQDPQTCKCSCKNTDSRCKARQLELNERTCRCDKPRR

SEQ ID NO: 226 - protein, 215 aa, Homo sapiens
MNFLLSWVHWSLALLLYLHHAKWSQAAPMAEGGGQNHHEVVKFMDVYQRSYCHPIETLVDIFQEYPDEIEYIFKPSCVPLMRCGGCCNDEGLECVPTEESNITMQIMRIKPHQGQHIGEMSFLQHNKCECRPKKDRARQEKKSVRGKGKGQKRKRKKSRYKSWSVPCGPCSERRKHLFVQDPQTCKCSCKNTDSRCKARQLELNERTCRCDKPRR

SEQ ID NO: 227 - protein, 232 aa, Homo sapiens
MNFLLSWVHWSLALLLYLHHAKWSQAAPMAEGGGQNHHEVVKFMDVYQRSYCHPIETLVDIFQEYPDEIEYIFKPSCVPLMRCGGCCNDEGLECVPTEESNITMQIMRIKPHQGQHIGEMSFLQHNKCECRPKKDRARQEKKSVRGKGKGQKRKRKKSRYKSWSVYVGARCCLMPWSLPGPHPCGPCSERRKHLFVQDPQTCKCSCKNTDSRCKARQLELNERTCRCDKPRR

SEQ ID NO: 228 - protein, 345 aa, Homo sapiens; identical to SEQ ID NO: 126

SEQ ID NO: 229 - protein, 1356 aa, Homo sapiens
MQSKVLLAVALWLCVETRAASVGLPSVSLDLPRLSIQKDILTIKANTTLQITCRGQRDLDWLWPNNQSGSEQRVEVTECSDGLFCKTLTIPKVIGNDTGAYKCFYRETDLASVIYVYVQDYRSPFIASVSDQHGVVYITENKNKTVVIPCLGSISNLNVSLCARYPEKRFVPDGNRISWDSKKGFTIPSYMISYAGMVFCEAKINDESYQSIMYIVVVVGYRIYDVVLSPSHGIELSVGEKLVLNCTARTELNVGIDFNWEYPSSKHQHKKLVNRDLKTQSGSEMKKFLSTLTIDGVTRSDQGLYTCAASSGLMTKKNSTFVRVHEKPFVAFGSGMESLVEATVGERVRIPAKYLGYPPPEIKWYKNGIPLESNHTIKAGHVLTIMEVSERDTGNYTVILTNPISKEKQSHVVSLVVYVPPQIGEKSLISPVDSYQYGTTQTLTCTVYAIPPPHHIHWYWQLEEECANEPSQAVSVTNPYPCEEWRSVEDFQGGNKIEVNKNQFALIEGKNKTVSTLVIQAANVSALYKCEAVNKVGRGERVISFHVTRGPEITLQPDMQPTEQESVSLWCTADRSTFENLTWYKLGPQPLPIHVGELPTPVCKNLDTLWKLNATMFSNSTNDILIMELKNASLQDQGDYVCLAQDRKTKKRHCVVRQLTVLERVAPTITGNLENQTTSIGESIEVSCTASGNPPPQIMWFKDNETLVEDSGIVLKDGNRNLTIRRVRKEDEGLYTCQACSVLGCAKVEAFFIIEGAQEKTNLEIIILVGTAVIAMFFWLLLVIILRTVKRANGGELKTGYLSIVMDPDELPLDEHCERLPYDASKWEFPRDRLKLGKPLGRGAFGQVIEADAFGIDKTATCRTVAVKMLKEGATHSEHRALMSELKILIHIGHHLNVVNLLGACTKPGGPLMVIVEFCKFGNLSTYLRSKRNEFVPYKTKGARFRQGKDYVGAIPVDLKRRLDSITSSQSSASSGFVEEKSLSDVEEEEAPEDLYKDFLTLEHLICYSFQVAKGMEFLASRKCIHRDLAARNILLSEKNVVKICDFGLARDIYKDPDYVRKGDARLPLKWMAPETIFDRVYTIQSDVWSFGVLLWEIFSLGASPYPGVKIDEEFCRRLKEGTRMRAPDYTTPEMYQTMLDCWHGEPSQRPTFSELVEHLGNLLQANAQQDGKDYIVLPISETLSMEEDSGLSLPTSPVSCMEEEEVCDPKFHYDNTAGISQYLQNSKRKSRPVSVKTFEDIPLEEPEVKVIPDDNQTDSGMVLASEELKTLEDRTKLSPSFGGMVPSKSRESVASEGSNQTSGYQSGYHSDDTDTTVYSSEEAELLKLIEIGVQTGSTAQILQPDSGTTLSSPPV

SEQ ID NO: 230 - protein, 1338 aa, Homo sapiens
MVSYWDTGVLLCALLSCLLLTGSSSGSKLKDPELSLKGTQHIMQAGQTLHLQCRGEAAHKWSLPEMVSKESERLSITKSACGRNGKQFCSTLTLNTAQANHTGFYSCKYLAVPTSKKKETESAIYIFISDTGRPFVEMYSEIPEIIHMTEGRELVIPCRVTSPNITVTLKKFPLDTLIPDGKRIIWDSRKGFIISNATYKEIGLLTCEATVNGHLYKTNYLTHRQTNTIIDVQISTPRPVKLLRGHTLVLNCTATTPLNTRVQMTWSYPDEKNKRASVRRRIDQSNSHANIFYSVLTIDKMQNKDKGLYTCRVRSGPSFKSVNTSVHIYDKAFITVKHRKQQVLETVAGKRSYRLSMKVKAFPSPEVVWLKDGLPATEKSARYLTRGYSLIIKDVTEEDAGNYTILLSIKQSNVFKNLTATLIVNVKPQIYEKAVSSFPDPALYPLGSRQILTCTAYGIPQPTIKWFWHPCNHNHSEARCDFCSNNEESFILDADSNMGNRIESITQRMAIIEGKNKMASTLVVADSRISGIYICIASNKVGTVGRNISFYITDVPNGFHVNLEKMPTEGEDLKLSCTVNKFLYRDVTWILLRTVNNRTMHYSISKQKMAITKEHSITLNLTIMNVSLQDSGTYACRARNVYTGEEILQKKEITIRDQEAPYLLRNLSDHTVAISSSTTLDCHANGVPEPQITWFKNNHKIQQEPGIILGPGSSTLFIERVTEEDEGVYHCKATNQKGSVESSAYLTVQGTSDKSNLELITLTCTCVAATLFWLLLTLFIRKMKRSSSEIKTDYLSIIMDPDEVPLDEQCERLPYDASKWEFARERLKLGKSLGRGAFGKVVQASAFGIKKSPTCRTVAVKMLKEGATASEYKALMTELKILTHIGHHLNVVNLLGACTKQGGPLMVIVEYCKYGNLSNYLKSKRDLFFLNKDAALHMEPKKEKMEPGLEQGKKPRLDSVTSSESFASSGFQEDKSLSDVEEEEDSDGFYKEPITMEDLISYSFQVARGMEFLSSRKCIHRDLAARNILLSENNVVKICDFGLARDIYKNPDYVRKGDTRLPLKWMAPESIFDKIYSTKSDVWSYGVLLWEIFSLGGSPYPGVQMDEDFCSRLREGMRMRAPEYSTPEIYQIMLDCWHRDPKERPRFAELVEKLGDLLQANVQQDGKDYIPINAILTGNSGFTYSTPAFSEDFFKESISAPKFNSGSSDDVRYVNAFKFMSLERIKTFEELLPNATSMFDDYQGDSSTLLASPMLKRFTWTDSKPKASLKIDLRVTSKSKESGLSDVSRPSFCHSSCGHVSEGKRRFTYDHAELERKIACCSPPPDYNSVVLYSTPPI

SEQ ID NO: 231 - protein, 1363 aa, Homo sapiens
MQRGAALCLRLWLCLGLLDGLVSGYSMTPPTLNITEESHVIDTGDSLSISCRGQHPLEWAWPGAQEAPATGDKDSEDTGVVRDCEGTDARPYCKVLLLHEVHANDTGSYVCYYKYIKARIEGTTAASSYVFVRDFEQPFINKPDTLLVNRKDAMWVPCLVSIPGLNVTLRSQSSVLWPDGQEVVWDDRRGMLVSTPLLHDALYLQCETTWGDQDFLSNPFLVHITGNELYDIQLLPRKSLELLVGEKLVLNCTVWAEFNSGVTFDWDYPGKQAERGKWVPERRSQQTHTELSSILTIHNVSQHDLGSYVCKANNGIQRFRESTEVIVHENPFISVEWLKGPILEATAGDELVKLPVKLAAYPPPEFQWYKDGKALSGRHSPHALVLKEVTEASTGTYTLALWNSAAGLRRNISLELVVNVPPQIHEKEASSPSIYSRHSRQALTCTAYGVPLPLSIQWHWRPWTPCKMFAQRSLRRRQQQDLMPQCRDWRAVTTQDAVNPIESLDTWTEFVEGKNKTVSKLVIQNANVSAMYKCVVSNKVGQDERLIYFYVTTIPDGFTIESKPSEELLEGQPVLLSCQADSYKYEHLRWYRLNLSTLHDAHGNPLLLDCKNVHLFATPLAASLEEVAPGARHATLSLSIPRVAPEHEGHYVCEVQDRRSHDKHCHKKYLSVQALEAPRLTQNLTDLLVNVSDSLEMQCLVAGAHAPSIVWYKDERLLEEKSGVDLADSNQKLSIQRVREEDAGRYLCSVCNAKGCVNSSASVAVEGSEDKGSMEIVILVGTGVIAVFFWVLLLLIFCNMRRPAHADIKTGYLSIIMDPGEVPLEEQCEYLSYDASQWEFPRERLHLGRVLGYGAFGKVVEASAFGIHKGSSCDTVAVKMLKEGATASEHRALMSELKILIHIGNHLNVVNLLGACTKPQGPLMVIVEFCKYGNLSNFLRAKRDAFSPCAEKSPEQRGRFRAMVELARLDRRRPGSSDRVLFARFSKTEGGARRASPDQEAEDLWLSPLTMEDLVCYSFQVARGMEFLASRKCIHRDLAARNILLSESDVVKICDFGLARDIYKDPDYVRKGSARLPLKWMAPESIFDKVYTTQSDVWSFGVLLWEIFSLGASPYPGVQINEEFCQRLRDGTRMRAPELATPAIRRIMLNCWSGDPKARPAFSELVEILGDLLQGRGLQEEEEVCMAPRSSQSSEEGSFSQVSTMALHIAQADAEDSPPSLQRHSLAARYYNWVSFPGCLARGAETRGSSRMKTFEEFPMTPTTYKGSVDNQTDSGMVLASEEFEQIESRHRQESGFSCKGPGQNVAVTRAHPDSQGRRRRPERGARGGQVFYNSEYGELSEPSEEDHCSPSARVTFFTDNSY

SEQ ID NO: 232 - protein, 923 aa, Homo sapiens
MERGLPLLCAVLALVLAPAGAFRNDKCGDTIKIESPGYLTSPGYPHSYHPSEKCEWLIQAPDPYQRIMINFNPHFDLEDRDCKYDYVEVFDGENENGHFRGKFCGKIAPPPVVSSGPFLFIKFVSDYETHGAGFSIRYEIFKRGPECSQNYTTPSGVIKSPGFPEKYPNSLECTYIVFVPKMSEIILEFESFDLEPDSNPPGGMFCRYDRLEIWDGFPDVGPHIGRYCGQKTPGRIRSSSGILSMVFYTDSAIAKEGFSANYSVLQSSVSEDFKCMEALGMESGEIHSDQITASSQYSTNWSAERSRLNYPENGWTPGEDSYREWIQVDLGLLRFVTAVGTQGAISKETKKKYYVKTYKIDVSSNGEDWITIKEGNKPVLFQGNTNPTDVVVAVFPKPLITRFVRIKPATWETGISMRFEVYGCKITDYPCSGMLGMVSGLISDSQITSSNQGDRNWMPENIRLVTSRSGWALPPAPHSYINEWLQIDLGEEKIVRGIIIQGGKHRENKVFMRKFKIGYSNNGSDWKMIMDDSKRKAKSFEGNNNYDTPELRTFPALSTRFIRIYPERATHGGLGLRMELLGCEVEAPTAGPTTPNGNLVDECDDDQANCHSGTGDDFQLTGGTTVLATEKPTVIDSTIQSEFPTYGFNCEFGWGSHKTFCHWEHDNHVQLKWSVLTSKTGPIQDHTGDGNFIYSQADENQKGKVARLVSPVVYSQNSAHCMTFWYHMSGSHVGTLRVKLRYQKPEEYDQLVWMAIGHQGDHWKEGRVLLHKSLKLYQVIFEGEIGKGNLGGIAVDDISINNHISQEDCAKPADLDKKNPEIKIDETGSTPGYEGEGEGDKNISRKPGNVLKTLDPILITIIAMSALGVLLGAVCGVVLYCACWHNGMSERNLSALENYNFELVDGVKLKKDKLNTQSTYSEA

SEQ ID NO: 233 - protein, 931 aa, Homo sapiens
MDMFPLTWVFLALYFSRHQVRGQPDPPCGGRLNSKDAGYITSPGYPQDYPSHQNCEWIVYAPEPNQKIVLNFNPHFEIEKHDCKYDFIEIRDGDSESADLLGKHCGNIAPPTIISSGSMLYIRFTSDYARQGAGFSLRYEIFKTGSEDCSKNFTSPNGTIESPGFPEKYPHNLDCTFTILAKPKMEIILQFLIFDLEHDPLQVGEGDCKYDWLDIWDGIPHVGPLIGKYCGTKTPSELRSSTGILSLTFHTDMAVAKDGFSARYYLVHQEPLENFQCNVPLGMESGRIANEQISASSTYSDGRWTPQQSRLHGDDNGWTPNLDSNKEYLQVDLRFLTMLTAIATQGAISRETQNGYYVKSYKLEVSTNGEDWMVYRHGKNHKVFQANNDATEVVLNKLHAPLLTRFVRIRPQTWHSGIALRLELFGCRVTDAPCSNMLGMLSGLIADSQISASSTQEYLWSPSAARLVSSRSGWFPRIPQAQPGEEWLQVDLGTPKTVKGVIIQGARGGDSITAVEARAFVRKFKVSYSLNGKDWEYIQDPRTQQPKLFEGNMHYDTPDIRRFDPIPAQYVRVYPERWSPAGIGMRLEVLGCDWTDSKPTVETLGPTVKSEETTTPYPTEEEATECGENCSFEDDKDLQLPSGFNCNFDFLEEPCGWMYDHAKWLRTTWASSSSPNDRTFPDDRNFLRLQSDSQREGQYARLISPPVHLPRSPVCMEFQYQATGGRGVALQVVREASQESKLLWVIREDQGGEWKHGRIILPSYDMEYQIVFEGVIGKGRSGEIAIDDIRISTDVPLENCMEPISAFAGENFKVDIPEIHEREGYEDEIDDEYEVDWSNSSSATSGSGAPSTDKEKSWLYTLDPILITIIAMSSLGVLLGATCAGLLLYCTCSYSGLSSRSCTTLENYNFELYDGLKHKVKMNHQKCCSEA

SEQ ID NO: 234 - protein, 160 aa, Homo sapiens
MTDQQAEARSYLSEEMIAEFKAAFDMFDADGGGDISVKELGTVMRMLGQTPTKEELDAIIEEVDEDGSGTIDFEEFLVMMVRQMKEDAKGKSEEELAECFRIFDRNADGYIDPEELAEIFRASGEHVTDEEIESLMKDGDKNNDGRIDFDEFLKMMEGVQ

SEQ ID NO: 235 - protein, 182 aa, Homo sapiens
MGDEEKRNRAITARRQHLKSVMLQIAATELEKEESRREAEKQNYLAEHCPPLHIPGSMSEVQELCKQLHAKIDAAEEEKYDMEVRVQKTSKELEDMNQKLFDLRGKFKRPPLRRVRMSADAMLKALLGSKHKVCMDLRANLKQVKKEDTEKERDLRDVGDWRKNIEEKSGMEGRKKMFESES

SEQ ID NO: 236 - protein, 258 aa, Homo sapiens
MSDEEVEQVEEQYEEEEEAQEEEEVQEDTAEEDAEEEKPRPKLTAPKIPEGEKVDFDDIQKKRQNKDLMELQALIDSHFEARKKEEEELVALKERIEKRRAERAEQQRIRAEKERERQNRLAEEKARREEEDAKRRAEDDLKKKKALSSMGANYSSYLAKADQKRGKKQTAREMKKKILAERRKPLNIDHLGEDKLRDKAKELWETLHQLEIDKFEFGEKLKRQKYDITTLRSRIDQAQKHSKKAGTPAKGKVGGRWK

SEQ ID NO: 237 - protein, 153 aa, Homo sapiens
  MISC_FEATURE (79)..(79): S-carboxyamidomethylcysteine
  MISC_FEATURE (96)..(96): S-carboxyamidomethylcysteine
ADGSSDAAREPRPAPAPIRRRSSNYRAYATEPHAKKKSKISASRKLQLKTLLLQIAKQELEREAEERRGEKGRALSTRCQPLELTGLGFAELQDLCRQLHARVDKVDEERYDIEAKVTKNITEIADLTQKIFDLRGKFKRPTLRRVRISADAM

SEQ ID NO: 238 - protein, 402 aa, Homo sapiens [sequence omitted]

SEQ ID NO: 239 - protein, 415 aa, Homo sapiens
MEDLCVANTLFALNLFKHLAKASPTQNLFLSPWSISSTMAMVYMGSRGSTEDQMAKVLQFNEVGANAVTPMTPENFTSCGFMQQIQKGSYPDAILQAQAADKIHSSFRSLSSAINASTGNYLLESVNKLFGEKSASFREEYIRLCQKYYSSEPQAVDFLECAEEARKKINSWVKTQTKGKIPNLLPEGSVDGDTRMVLVNAVYFKGKWKTPFEKKLNGLYPFRVNSAQRTPVQMMYLREKLNIGYIEDLKAQILELPYAGDVSMFLLLPDEIADVSTGLELLESEITYDKLNKWTSKDKMAEDEVEVYIPQFKLEEHYELRSILRSMGMEDAFNKGRANFSGMSERNDLFLSEVFHQAMVDVNEEGTEAAAGTGGVMTGRTGHGGPQFVADHPFLFLIMHKITNCILFFGRFSSP

SEQ ID NO: 240 - protein, 368 aa, Homo sapiens
MVLEVSDHQVLNDAEVAALLENFSSSYDYGENESDSCCTSPPCPQDFSLNFDRAFLPALYSLLFLLGLLGNGAVAAVLLSRRTALSSTDTFLLHLAVADTLLVLTLPLWAVDAAVQWVFGSGLCKVAGALFNINFYAGALLLACISFDRYLNIVHATQLYRRGPPARVTLTCLAVWGLCLLFALPDFIFLSAHHDERLNATHCQYNFPQVGRTALRVLQLVAGFLLPLLVMAYCYAHILAVLLVSRGQRRLRAMRLVVVVVVAFALCWTPYHLVVLVDILMDLGALARNCGRESRVDVAKSVTSGLGYMHCCLNPLLYAFVGVKFRERMWMLLLRLGCPNQRGLQRQPSSSRRDSSWSETSEASYSGL

SEQ ID NO: 241 - protein, 91 aa, Homo sapiens
MKVSAAALAVILIATALCAPASASPYSSDTTPCCFAYIARPLPRAHIKEYFYTSGKCSNPAVVFVTRKNRQVCANPEKKWVREYINSLEMS

SEQ ID NO: 242 - protein, 98 aa, Homo sapiens
MNQTAILICCLIFLTLSGIQGVPLSRTVRCTCISISNQPVNPRSLEKLEIIPASQFCPRVEIIATMKKKGEKRCLNPESKAIKNLLKAVSKERSKRSP

SEQ ID NO: 243 - protein, 378 aa, Homo sapiens
MDLGKPMKSVLVVALLVIFQVCLCQDEVTDDYIGDNTTVDYTLFESLCSKKDVRNFKAWFLPIMYSIICFVGLLGNGLVVLTYIYFKRLKTMTDTYLLNLAVADILFLLTLPFWAYSAAKSWVFGVHFCKLIFAIYKMSFFSGMLLLLCISIDRYVAIVQAVSAHRHRARVLLISKLSCVGIWILATVLSIPELLYSDLQRSSSEQAMRCSLITEHVEAFITIQVAQMVIGFLVPLLAMSFCYLVIIRTLLQARNFERNKAIKVIIAVVVVFIVFQLPYNGVVLAQTVANFNITSSTCELSKQLNIAYDVTYSLACVRCCVNPFLYAFIGVKFRNDLFKLFKDLGCLSQEQLRQWSSCRHIRRSSMSVEAETTTTFSP

SEQ ID NO: 244 - protein, 397 aa, Homo sapiens
MAPISLSWLLRLATFCHLTVLLAGQHHGVTKCNITCSKMTSKIPVALLIHYQQNQASCGKRAIILETRQHRLFCADPKEQWVKDAMQHLDRQAAALTRNGGTFEKQIGEVKPRTTPAAGGMDESVVLEPEATGESSSLEPTPSSQEAQRALGTSPELPTGVTGSSGTRLPPTPKAQDGGPVGTELFRVPPVSTAATWQSSAPHQPGPSLWAEAKTSEAPSTQDPSTQASTASSPAPEENAPSEGQRVWGQGQSPRPENSLEREEMGPVPAHTDAFQDWGPGSMAHVSVVPVSSEGTPSREPVASGSWTPKAEEPIHATMDPQRLGVLITPVPDAQAATRRQAVGLLAFLGLLFCLGVAMFTYQSLQGCPRKMAGEMAEGLRYIPRSCGSNSYVLVPV

SEQ ID NO: 245 - protein, 97 aa, Homo sapiens
MKVSAALLWLLLIAAAFSPQGLAGPASVPTTCCFNLANRKIPLQRLESYRRITSGKCPQKAVIFKTKLAKDICADPKKKWVQDSMKYLDQKSPTPKP

SEQ ID NO: 246 - protein, 134 aa, Homo sapiens
MAQSLALSLLILVLAFGIPRTQGSDGGAQDCCLKYSQRKIPAKVVRSYRKQEPSLGCSIPAILFLPRKRSQAELCADPKELWVQQLMQHLDKTPSPQKPAQGCRKDRGASKTGKKGKGSKGCKRTERSQTPKGP

SEQ ID NO: 247 - protein, 114 aa, Homo sapiens
MRLLILALLGICSLTAYIVEGVGSEVSDKRTCVSLTTQRLPVSRIKTYTITEGSLRAVIFITKRGLKVCADPQATWVRDVVRSMDRKSNTRNNMIQTKPTGTQQSTNTAVTLTG

SEQ ID NO: 248 - protein, 96 aa, Homo sapiens
MCCTKSLLLAALMSVLLLHLCGESEAASNFDCCLGYTDRILHPKFIVGFTRQLANEGCDINAIIFHTKKKLSVCANPKQTWVKYIVRLLSKKVKNM

SEQ ID NO: 249 - protein, 98 aa, Homo sapiens
MALLLALSLLVLWTSPAPTLSGTNDAEDCCLSVTQKPIPGYIVRNFHYLLIKDGCRVPAVVFTTLRGRQLCAPPDQPWVERIIQRLQRTSAKMKRRSS

SEQ ID NO: 250 - protein, 353 aa, Homo sapiens
MELTELLLVVMLLLTARLTLSSPAPPACDLRVLSKLLRDSHVLHSRLSQCPEVHPLPTPVLLPAVDFSLGEWKTQMEETKAQDILGAVTLLLEGVMAARGQLGPTCLSSLLGQLSGQVRLLLGALQSLLGTQLPPQGRTTAHKDPNAIFLSFQHLLRGKVRFLMLVGGSTLCVRRAPPTTAVPSRTSLVLTLNELPNRTSGLLETNFTASARTTGSGLLKWQQGFRAKIPGLLNQTSRSLDQIPGYLNRIHELLNGTRGLFPGPSRRTLGAPDISSGTSDTGSLPPNLQPGYSPSPTHPPTGQYTLFPLPPTLPTPVVQLHPLLPDPSAPTPTPTSPLLNTSYTHSQNLSQEG

SEQ ID NO: 251 - protein, 273 aa, Homo sapiens
MKKTQTWILTCIYLQLLLFNPLVKTEGICRNRVTNNVKDVTKLVANLPKDYMITLKYVPGMDVLPSHCWISEMVVQLSDSLTDLLDKFSNISEGLSNYSIIDKLVNIVDDLVECVKENSSKDLKKSFKSPEPRLFTPEEFFRIFNRSIDAFKDFVVASETSDCVVSSTLSPEKDSRVSVTKPFMLPPVAASSLRNDSSSSNRKAKNPPGDSSLHWAAMALPALFSLIIGFAFGALYWKKRQPSLTRAVENIQINEEDNEISMLQEKEREFQEV

SEQ ID NO: 252 - protein, 149 aa, Homo sapiens
MPVMRLFPCFLQLLAGLALPAVPPQQWALSAGNGSSEVEVVPFQEVWGRSYCRALERLVDVVSEYPSEVEHMFSPSCVSLLRCTGCCGDENLHCVPVETANVTMQLLKIRSGDRPSYVELTFSQHVRCECRPLREKMKPERCGDAVPRR

SEQ ID NO: 253 - protein, 170 aa, Homo sapiens
MPVMRLFPCFLQLLAGLALPAVPPQQWALSAGNGSSEVEVVPFQEVWGRSYCRALERLVDVVSEYPSEVEHMFSPSCVSLLRCTGCCGDENLHCVPVETANVTMQLLKIRSGDRPSYVELTFSQHVRCECRPLREKMKPERRRPKGRGKRRREKQRPTDCHLCGDAVPRR

SEQ ID NO: 254 - protein, 241 aa, Homo sapiens
MSMLFYTLITAFLIGIQAEPHSESNVPAGHTIPQAHWTKLQHSLDTALRRARSAPAAAIAARVAGQTRNITVDPRLFKKRRLRSPRVLFSTQPPREAADTQDLDFEVGGAAPFNRTHRSKRSSSHPIFHRGEFSVCDSVSVWVGDKTTATDIKGKEVMVLGEVNINNSVFKQYFFETKCRDPNPVDSGCRGIDSKHWNSYCTTTHTFVKALTMDGKQAAWRFIRIDTACVCVLSRKAVRRA

SEQ ID NO: 255 - protein, 257 aa, Homo sapiens
MSILFYVIFLAYLRGIQGNNMDQRSLPEDSLNSLIIKLIQADILKNKLSKQMVDVKENYQSTLPKAEAPREPERGGPAKSAFQPVIAMDTELLRQQRRYNSPRVLLSDSTPLEPPPLYLMEDYVGSPVVANRTSRRKRYAEHKSHRGEYSVCDSESLWVTDKSSAIDIRGHQVTVLGEIKTGNSPVKQYFYETRCKEARPVKNGCRGIDDKHWNSQCKTSQTYVRALTSENNKLVGWRWIRIDTSCVCALSRKIGRT

SEQ ID NO: 256 - protein, 210 aa, Homo sapiens
MLPLPSCSLPILLLFLLPSVPIESQPPPSTLPPFLAPEWDLLSPRVVLSRGAPAGPPLLFLLEAGAFRESAGAPANRSRRGVSETAPASRRGELAVCDAVSGWVTDRRTAVDLRGREVEVLGEVPAAGGSPLRQYFFETRCKADNAEEGGPGAGGGGCRGVDRRHWVSECKAKQSYVRALTADAQGRVGWRWIRIDTACVCTLLSRTGRA

SEQ ID NO: 257 - protein, 211 aa, Homo sapiens [sequence omitted]

SEQ ID NO: 258 - protein, 241 aa, Homo sapiens; identical to SEQ ID NO: 124

SEQ ID NO: 259 - protein, 89 aa, Homo sapiens
MNAKVVVVLVLVLTALCLSDGKPVSLSYRCPCRFFESHVARANVKHLKILNTPNCALQIVARLKNNNRQVCIDPKLKWIQEYLEKALNK

SEQ ID NO: 260 - protein, 93 aa, Homo sapiens
MNAKVVVVLVLVLTALCLSDGKPVSLSYRCPCRFFESHVARANVKHLKILNTPNCALQIVARLKNNNRQVCIDPKLKWIQEYLEKALNKRFKM

SEQ ID NO: 261 - protein, 94 aa, Homo sapiens
MAPLKMLALVTLLLGASLQHIHAARGTNVGRECCLEYFKGAIPLRKLKTWYQTSEDCSRDAIVFVTVQGRAICSDPNNKRVKNAVKYLQSLERS

SEQ ID NO: 262 - protein, 227 aa, Homo sapiens
MNIKGSPWKGSLLLLLVSNLLLCQSVAPLPICPGGAARCQVTLRDLFDRAVVLSHYIHNLSSEMFSEFDKRYTHGRGFITKAINSCHTSSLATPEDKEQAQQMNQKDFLSLIVSILRSWNEPLYHLVTEVRGMQEAPEAILSKAVEIEEQTKRLLEGMELIVSQVHPETKENEIYPVWSGLPSLQMADEESRLSAYYNLLHCLRRDSHKIDNYLKLLKCRIIHNNNC

SEQ ID NO: 263 - protein, 116 aa, Homo sapiens
MDYYRKYAAIFLVTLSVFLHVLHSAPDVQDCPECTLQENPFFSQPGAPILQCMGCCFSRAYPTPLRSKKTMLVQKNVTSESTCCVAKSYNRVTVMGGFKVENHTACHCSTCYYHKS

SEQ ID NO: 264 - protein, 129 aa, Homo sapiens
MKTLQFFFLFCCWKAICCNSCELTNITIAIEKEECRFCISINTTWCAGYCYTRDLVYKDPARPKIQKTCTFKELVYETVRVPGCAHHADSLYTYPVATQCHCGKCDSDSTDCTVRGLGPSYCSFGEMKE

SEQ ID NO: 265 - protein, 125 aa, Homo sapiens
MAGPSLACCLLGLLALTSACYIQNCPLGGKRAAPDLDVRKCLPCGPGGKGRCFGPNICCAEELGCFVGTAEALRCQEENYLPSPCQSGQKACGSGGRCAVLGLCCSPDGCHADPACDAEATFSQR

SEQ ID NO: 266 - protein, 164 aa, Homo sapiens
MPDTMLPACFLGLLAFSSACYFQNCPRGGKRAMSDLELRQCLPCGPGGKGRCFGPSICCADELGCFVGTAEALRCQEENYLPSPCQSGQKACGSGGRCAAFGVCCNDESCVTEPECREGFHRRARASDRSNATQLDGPAGALLLRLVQLAGAPEPFEPAQPDAY

SEQ ID NO: 267 - protein, 269 aa, Homo sapiens
MAEVPELASEMMAYYSGNEDDLFFEADGPKQMKCSFQDLDLCPLDGGIQLRISDHHYSKGFRQAASVVVAMDKLRKMLVPCPQTFQENDLSTFFPFIFEEEPIFFDTWDNEAYVHDAPVRSLNCTLRDSQQKSLVMSGPYELKALHLQGQDMEQQVVFSMSFVQGEESNDKIPVALGLKEKNLYLSCVLKDDKPTLQLESVDPKNYPKKKMEKRFVFNKIEINNKLEFESAQFPNWYISTSQAENMPVFLGGTKGGQDITDFTMQFVSS

SEQ ID NO: 268 - protein, 153 aa, Homo sapiens [sequence omitted]

SEQ ID NO: 269 - protein, 271 aa, Homo sapiens
MAKVPDMFEDLKNCYSENEEDSSSIDHLSLNQKSFYHVSYGPLHEGCMDQSVSLSISETSKTSKLTFKESMVVVATNGKVLKKRRLSLSQSITDDDLEAIANDSEEEIIKPRSAPFSFLSNVKYNFMRIIKYEFILNDALNQSIIRANDQYLTAAALHNLDEAVKFDMGAYKSSKDDAKITVILRISKTQLYVTAQDEDQPVLLKEMPEIPKTITGSETNLLFFWETHGTKNYFTSVAHPNLFIATKQDYWVCLAGGPPSITDFQILENQA

SEQ ID NO: 270 - protein, 212 aa, Homo sapiens
MNSFSTSAFGPVAFSLGLLLVLPAAFPAPVPPGEDSKDVAAPHRQPLTSSERIDKQIRYILDGISALRKETCNKSNMCESSKEALAENNLNLPKMAEKDGCFQSGFNEETCLVKIITGLLEFEVYLEYLQNRFESSEEQARAVQMSTKVLIQFLQKKAKNLDAITTPDPTTNASLLTKLQAQNQWLQDMTTHLILRSFKEFLQSSLRALRQM

SEQ ID NO: 271 - protein, 146 aa, Homo sapiens [sequence omitted]

SEQ ID NO: 272 - protein, 178 aa, Homo sapiens
MHSSALLCCLVLLTGVRASPGQGTQSENSCTHFPGNLPNMLRDLRDAFSRVKTFFQMKDQLDNLLLKESLLEDFKGYLGCQALSEMIQFYLEEVMPQAENQDPDIKAHVNSLGENLKTLRLRLRRCHRFLPCENKSKAVEQVKNAFNKLQEKGIYKAMSEFDIFINYIEAYMTMKIRN

SEQ ID NO: 273 - protein, 160 aa, Homo sapiens
SPGQGTQSENSCTHFPGNLPNMLRDLRDAFSRVKTFFQMKDQLDNLLLKESLLEDFKGYLGCQALSEMIQFYLEEVMPQAENQDPDIKAHVNSLGENLKTLRLRLRRCHRFLPCENKSKAVEQVKNAFNKLQEKGIYKAMSEFDIFINYIEAYMTMKIRN

SEQ ID NO: 274 - protein, 269 aa, Homo sapiens; identical to SEQ ID NO: 267

SEQ ID NO: 275 - protein, 350 aa, Homo sapiens [sequence omitted]

SEQ ID NO: 276 - protein, 177 aa, Homo sapiens
MFHVSFRYIFGLPPLILVLLPVASSDCDIEGKDGKQYESVLMVSIDQLLDSMKEIGSNCLNNEFNFFKRHICDANKEGMFLFRAARKLRQFLKMNSTGDFDLHLLKVSEGTTILLNCTGQVKGRKPAALGEAQPTKSLEENKSLKEQKKLNDLCFLKRLLQEIKTCWNKILMGTKEH

SEQ ID NO: 277 - protein, 328 aa, Homo sapiens
MCHQQLVISWFSLVFLASPLVAIWELKKDVYVVELDWYPDAPGEMVVLTCDTPEEDGITWTLDQSSEVLGSGKTLTIQVKEFGDAGQYTCHKGGEVLSHSLLLLHKKEDGIWSTDILKDQKEPKNKTFLRCEAKNYSGRFTCWWLTTISTDLTFSVKSSRGSSDPQGVTCGAATLSAERVRGDNKEYEYSVECQEDSACPAAEESLPIEVMVDAVHKLKYENYTSSFFIRDIIKPDPPKNLQLKPLKNSRQVEVSWEYPDTWSTPHSYFSLTFCVQVQGKSKREKKDRVFTDKTSATVICRKNASISVRAQDRYYSSSWSEWASVPCS

SEQ ID NO: 278 - protein, 470 aa, Homo sapiens
MGKPWLRALQLLLLLGASWARAGAPRCTYTFVLPPQKFTGAVCWSGPASTRATPEAANASELAALRMRVGRHEELLRELQRLAAADGAVAGEVRALRKESRGLSARLGQLRAQLQHEAGPGAGPGADLGAEPAAALALLGERVLNASAEAQRAAARFHQLDVKFRELAQLVTQQSSLIARLERLCPGGAGGQQQVLPPPPLVPVVPVRLVGSTSDTSRMLDPAPEPQRDQTQRQQEPMASPMPAGHPAVPTKPVGPWQDCAEARQAGHEQSGVYELRVGRHVVSVWCEQQLEGGGWTVIQRRQDGSVNFFTTWQHYKAGFGRPDGEYWLGLEPVYQLTSRGDHELLVLLEDWGGRGARAHYDGFSLEPESDHYRLRLGQYHGDAGDSLSWHNDKPFSTVDRDRDSYSGNCALYQRGGWWYHACAHSNLNGVWHHGGHYRSRYQDGVYWAEFRGGAYSLRKAAMLIRPLKL

SEQ ID NO: 279 - protein, 144 aa, Homo sapiens
MLLAMVLTSALLLCSVAGQGCPTLAGILDINFLINKMQEDPASKCHCSANVTSCLCLGIPSDNCTRPCFSERLSQMTNTTMQTRYPLIFSRVKKSVEVLKNNKCPYFSCEQPCNQTTAGNALTFLKSLLEIFQKEKMRGMRGKI

SEQ ID NO: 280 - protein, 152 aa, Homo sapiens
MSRLPVLLLLQLLVRPGLQAPMTQTTPLKTSWVNCSNMIDEIITHLKQPPLPLLDFNNLNGEDQDILMENNLRRPNLEAFNRAVKSLQNASAIESILKNLLPCLPLATAAPTRHPIHIKDGDWNEFRRKLTFYLKTLENAQAQQTTLSLAIF

SEQ ID NO: 281 - protein, 134 aa, Homo sapiens
MRMLLHLSLLALGAAYVYAIPTEIPTSALVKETLALLSTHRTLLIANETLRIPVPVHKNHQLCTEEIFQGIGTLESQTVQGGTVERLFKNLSLIKKYIDGQKKKCGEERRRVNQFLDYLQEFLGVMNTEWIIES

SEQ ID NO: 282 - protein, 1332 aa, Homo sapiens
MESHSRAGKSRKSAKFRSISRSLMLCNAKTSDDGSSPDEKYPDPFEISLAQGKEGIFHSSVQLADTSEAGPSSVPDLALASEAAQLQAAGNDRGKTCRRIFFMKESSTASSREKPGKLEAQSSNFLFPKACHQRARSNSTSVNPYCTREIDFPMTKKSAAPTDRQPYSLCSNRKSLSQQLDCPAGKAAGTSRPTRSLSTAQLVQPSGGLQASVISNIVLMKGQAKGLGFSIVGGKDSIYGPIGIYVKTIFAGGAAAADGRLQEGDEILELNGESMAGLTHQDALQKFKQAKKGLLTLTVRTRLTAPPSLCSHLSPPLCRSLSSSTCITKDSSSFALESPSAPISTAKPNYRIMVEVSLQKEAGVGLGIGLCSVPYFQCISGIFVHTLSPGSVAHLDGRLRCGDEIVEISDSPVHCLTLNEVYTILSHCDPGPVPIIVSRHPDPQVSEQQLKEAVAQAVENTKFGKERHQWSLEGVKRLESSWHGRPTLEKEREKNSAPPHRRAQKVMIRSSSDSSYMSGSPGGSPGSGSAEKPSSDVDISTHSPSLPLAREPVVLSIASSRLPQESPPLPESRDSHPPLRLKKSFEILVRKPMSSKPKPPPRKYFKSDSDPQKSLEERENSSCSSGHTPPTCGQEARELLPLLLPQEDTAGRSPSASAGCPGPGIGPQTKSSTEGEPGWRRASPVTQTSPIKHPLLKRQARMDYSFDTTAEDPWVRISDCIKNLFSPIMSENHGHMPLQPNASLNEEEGTQGHPDGTPPKLDTANGTPKVYKSADSSTVKKGPPVAPKPAWFRQSLKGLRNRASDPRGLPDPALSTQPAPASREHLGSHIRASSSSSSIRQRISSFETFGSSQLPDKGAQRLSLQPSSGEAAKPLGKHEEGRFSGLLGRGAAPTLVPQQPEQVLSSGSPAASEARDPGVSESPPPGRQPNQKTLPPGPDPLLRLLSTQAEESQGPVLKMPSQRARSFPLTRSQSCETKLLDEKTSKLYSISSQVSSAVMKSLLCLPSSISCAQTPCIPKEGASPTSSSNEDSAANGSAETSALDTGFSLNLSELREYTEGLTEAKEDDDGDHSSLQSGQSVISLLSSEELKKLIEEVKVLDEATLKQLDGIHVTILHKEEGAGLGFSLAGGADLENKVITVHRVFPNGLASQEGTIQKGNEVLSINGKSLKGTTHHDALAILRQAREPRQAVIVTRKLTPEAMPDLNSSTDSAASASAASDVSVESTAEATVCTVTLEKMSAGLGFSLEGGKGSLHGDKPLTINRIFKGAASEQSETVQPGDEILQLGGTAMQGLTRFEAWNIIKALPDGPVTIVIRRKSLQSKETTAAGDS

SEQ ID NO: 283 - protein, 193 aa, Homo sapiens
MAAEPVEDNCINFVAMKFIDNTLYFIAEDDENLESDYFGKLESKLSVIRNLNDQVLFIDQGNRPLFEDMTDSDCRDNAPRTIFIISMYKDSQPRGMAVTISVKCEKISTLSCENKIISFKEMNPPDNIKDTKSDIIFFQRSVPGHDNKMQFESSSYEGYFLACEKERDLFKLILKKEDELGDRSIMFTVQNED

SEQ ID NO: 284 - protein, 219 aa, Homo sapiens
MCPARSLLLVATLVLLDHLSLARNLPVATPDPGMFPCLHHSQNLLRAVSNMLQKARQTLEFYPCTSEEIDHEDITKDKTSTVEACLPLELTKNESCLNSRETSFITNGSCLASRKTSFMMALCLSSIYEDLKMYQVEFKTMNAKLLMDPKRQIFLDQNMLAVIDELMQALNFNSETVPQKSSLEEPDFYKTKIKLCILLHAFRIRAVTIDRVMSYLNAS

SEQ ID NO: 285 - protein, 162 aa, Homo sapiens
MRISKPHLRSISIQCYLCLLLNSHFLTEAGIHVFILGCFSAGLPKTEANWVNVISDLKKIEDLIQSMHIDATLYTESDVHPSCKVTAMKCFLLELQVISLESGDASIHDTVENLIILANNSLSSNGNVTESGCKECEELEEKNIKEFLQSFVHIVQMFINTS

SEQ ID NO: 286 - protein, 153 aa, Homo sapiens [sequence omitted]

SEQ ID NO: 287 - protein, 154 aa, Homo sapiens
MVLSGALCFRMKDSALKVLYLHNNQLLAGGLHAGKVIKGEEISWPNRWLDASLSPVILGVQGGSQCLSCGVGQEPTLTLEPVNIMELYLGAKESKSFTFYRRDMGLTSSFESAAYPGWFLCTVPEADQPVRLTQLPENGGWNAPITDFYFQQCD

SEQ ID NO: 288 - protein, 199 aa, Homo sapiens
MNCVCRLVLVVLSLWPDTAVAPGPPPGPPRVSPDPRAELDSTVLLTRSLLADTRQLAAQLRDKFPADGDHNLDSLPTLAMSAGALGALQLPGVLTRLRADLLSYLRHVQWLRRAGGSSLKTLEPELGTLQARLDRLLRRLQLLMSRLALPQPPPDPPAPPLAPPSSAWGGIRAAHAILGGLHLTLDWAVRGLLLLKTRL

SEQ ID NO: 289 - protein, 546 aa, Homo sapiens
MKNQDKKNGAAKQSNPKSSPGQPEAGPEGAQERPSQAAPAVEAEGPGSSQAPRKPEGAQARTAQSGALRDVSEELSRQLEDILSTYCVDNNQGGPGEDGAQGEPAEPEDAEKSRTYVARNGEPEPTPVVNGEKEPSKGDPNTEEIRQSDEVGDRDHRRPQEKKKAKGLGKEITLLMQTLNTLSTPEEKLAALCKKYAELLEEHRNSQKQMKLLQKKQSQLVQEKDHLRGEHSKAVLARSKLESLCRELQRHNRSLKEEGVQRAREEEEKRKEVTSHFQVTLNDIQLQMEQHNERNSKLRQENMELAERLKKLIEQYELREEHIDKVFKHKDLQQQLVDAKLQQAQEMLKEAEERHQREKDFLLKEAVESQRMCELMKQQETHLKQQLALYTEKFEEFQNTLSKSSEVFTTFKQEMEKMTKKIKKLEKETTMYRSRWESSNKALLEMAEEKTVRDKELEGLQVKIQRLEKLCRALQTERNDLNKRVQDLSAGGQGSLTDSGPERRPEGPGAQAPSSPRVTEAPCYPGAPSTEASGQTGPQEPTSARA

SEQ ID NO: 290 - protein, 866 aa, Homo sapiens
MGAARSPPSAVPGPLLGLLLLLLGVLAPGGASLRLLDHRALVCSQPGLNCTVKNSTCLDDSWIHPRNLTPSSPKDLQIQLHFAHTQQGDLFPVAHIEWTLQTDASILYLEGAELSVLQLNTNERLCVRFEFLSKLRHHHRRWRFTFSHFVVDPDQEYEVTVHHLPKPIPDGDPNHQSKNFLVPDCEHARMKVTTPCMSSGSLWDPNITVETLEAHQLRVSFTLWNESTHYQILLTSFPHMENHSCFEHMHHIPAPRPEEFHQRSNVTLTLRNLKGCCRHQVQIQPFFSSCLNDCLRHSATVSCPEMPDTPEPIPDYMPLWVYWFITGISILLVGSVILLIVCMTWRLAGPGSEKYSDDTKYTDGLPAADLIPPPLKPRKVWIIYSADHPLYVDVVLKFAQFLLTACGTEVALDLLEEQAISEAGVMTWVGRQKQEMVESNSKIIVLCSRGTRAKWQALLGRGAPVRLRCDHGKPVGDLFTAAMNMILPDFKRPACFGTYVVCYFSEVSCDGDVPDLFGAAPRYPLMDRFEEVYFRIQDLEMFQPGRMHRVGELSGDNYLRSPGGRQLRAALDRFRDWQVRCPDWFECENLYSADDQDAPSLDEEVFEEPLLPPGTGIVKRAPLVREPGSQACLAIDPLVGEEGGAAVAKLEPHLQPRGQPAPQPLHTLVLAAEEGALVAAVEPGPLADGAAVRLALAGEGEACPLLGSPGAGRNSVLFLPVDPEDSPLGSSTPMASPDLLPEDVREHLEGLMLSLFEQSLSCQAQGGCSRPAMVLTDPHTPYEEEQRQSVQSDQGYISRSSPQPPEGLTEMEEEEEEEQDPGKPALPLSPEDLESLRSLQRQLLFRQLQKNSGWDTMGSESEGPSA

SEQ ID NO: 291 - protein, 155 aa, Homo sapiens
MTPGKTSLVSLLLLLSLEAIVKAGITIPRNPGCPNSEDKNFPRTVMVNLNIHNRNTNTNPKRSSDYYNRSTSPWNLHRNEDPERYPSVIWEAKCRHLGCINADGNVDYHMNSVPIQQEILVLRREPPHCPNSFRLEKILVSVGCTCVTPIVHHVA

SEQ ID NO: 292 - protein, 177 aa, Homo sapiens
MKLQCVSLWLLGTILILCSVDNHGLRRCLISTDMHHIEESFQEIKRAIQAKDTFPNVTILSTLETLQIIKPLDVCCVTKNLLAFYVDRVFKDHQEPNPKILRKISSIANSFLYMQKTLRQCQEQRQCHCRQEATNATRVIHDNYDQLEVHAAAIKSLGELDVFLAWINKNHEVMFSA

SEQ ID NO: 293 - protein, 155 aa, Homo sapiens
MERIVICLMVIFLGTLVHKSSSQGQDRHMIRMRQLIDIVDQLKNYVNDLVPEFLPAPEDVETNCEWSAFSCFQKAQLKSANTGNNERIINVSIKKLKRKPPSTNAGRRQKHRLTCPSCDSYEKKPPKEFLERFKSLLQKMIHQHLSSRTHGSEDS

SEQ ID NO: 294 - protein, 350 aa, Homo sapiens
MSNITDPQMWDFDDLNFTGMPPADEDYSPCMLETETLNKYVVIIAYALVFLLSLLGNSLVMLVILYSRVGRSVTDVYLLNLALADLLFALTLPIWAASKVNGWIFGTFLCKVVSLLKEVNFYSGILLLACISVDRYLAIVHATRTLTQKRHLVKFVCLGCWGLSMNLSLPFFLFRQAYHPNNSSPVCYEVLGNDTAKWRMVLRILPHTFGFIVPLFVMLFCYGFTLRTLFKAHMGQKHRAMRVIFAVVLIFLLCWLPYNLVLLADTLMRTQVIQESCERRNNIGRALDATEILGFLHSCLNPIIYAFIGQNFRHGFLKILAMHGLVSKEFLARHRVTSYTSSSVNVSSNL

SEQ ID NO: 295 - protein, 360 aa, Homo sapiens
MEDFNMESDSFEDFWKGEDLSNYSYSSTLPPFLLDAAPCEPESLEINKYFVVIIYALVFLLSLLGNSLVMLVILYSRVGRSVTDVYLLNLALADLLFALTLPIWAASKVNGWIFGTFLCKVVSLLKEVNFYSGILLLACISVDRYLAIVHATRTLTQKRYLVKFICLSIWGLSLLLALPVLLFRRTVYSSNVSPACYEDMGNNTANWRMLLRILPQSFGFIVPLLIMLFCYGFTLRTLFKAHMGQKHRAMRVIFAVVLIFLLCWLPYNLVLLADTLMRTQVIQETCERRNHIDRALDATEILGILHSCLNPLIYAFIGQKFRHGLLKILAIHGLISKDSLPKDSRPSFVGSSSGHTSTTL

SEQ ID NO: 296 - protein, 398 aa, Homo sapiens
MLRLYVLVMGVSAFTLQPAAHTGAARSCRFRGRHYKREFRLEGEPVALRCPQVPYWLWASVSPRINLTWHKNDSARTVPGEEETRMWAQDGALWLLPALQEDSGTYVCTTRNASYCDKMSIELRVFENTDAFLPFISYPQILTLSTSGVLVCPDLSEFTRDKTDVKIQWYKDSLLLDKDNEKFLSVRGTTHLLVHDVALEDAGYYRCVLTFAHEGQQYNITRSIELRIKKKKEETIPVIISPLKTISASLGSRLTIPCKVFLGTGTPLTTMLWWTANDTHIESAYPGGRVTEGPRQEYSENNENYIEVPLIFDPVTREDLHMDFKCVVHNTLSFQTLRTTVKEASSTFSWGIVLAPLSLAFLVLGGIWMHRRCKHRTGKADGLTVLWPHHQDFQSYPK

SEQ ID NO: 297 - protein, 422 aa, Homo sapiens
MSSSCSGLSRVLVAVATALVSASSPCPQAWGPPGVQYGQPGRSVKLCCPGVTAGDPVSWFRDGEPKLLQGPDSGLGHELVLAQADSTDEGTYICQTLDGALGGTVTLQLGYPPARPVVSCQAADYENFSCTWSPSQISGLPTRYLTSYRKKTVLGADSQRRSPSTGPWPCPQDPLGAARCVVHGAEFWSQYRINVTEVNPLGASTRLLDVSLQSILRPDPPQGLRVESVPGYPRRLRASWTYPASWPCQPHFLLKFRLQYRPAQHPAWSTVEPAGLEEVITDAVAGLPHAVRVSARDFLDAGTWSTWSPEAWGTPSTGTIPKEIPAWGQLHTQPEVEPQVDSPAPPRPSLQPHPRLLDHRDSVEQVAVLASLGILSFLGLVAGALALGLWLRLRRGGKDGSPKPGFLASVIPVDRRPGAPNL

SEQ ID NO: 298 - protein, 427 aa, Homo sapiens
MEWPARLCGLWALLLCAGGGGGGGGAAPTETQPPVTNLSVSVENLCTVIWTWNPPEGASSNCSLWYFSHFGDKQDKKIAPETRRSIEVPLNERICLQVGSQCSTNESEKPSILVEKCISPPEGDPESAVTELQCIWHNLSYMKCSWLPGRNTSPDTNYTLYYWHRSLEKIHQCENIFREGQYFGCSFDLTKVKDSSFEQHSVQIMVKDNAGKIKPSFNIVPLTSRVKPDPPHIKNLSFHNDDLYVQWENPQNFISRCLFYEVEVNNSQTETHNVFYVQEAKCENPEFERNVENTSCFMVPGVLPDTLNTVRIRVKTNKLCYEDDKLWSNWSQEMSIGKKRNSTLYITMLLIVPVIVAGAIIVLLLYLKRLKIIIFPPIPDPGKIFKEMFGDQNDDTLHWKKYDIYEKQTKEETDSVVLIENLKKASQ

SEQ ID NO: 299 - protein, 380 aa, Homo sapiens
MAFVCLAIGCLYTFLISTTFGCTSSSDTEIKVNPPQDFEIVDPGYLGYLYLQWQPPLSLDHFKECTVEYELKYRNIGSETWKTIITKNLHYKDGFDLNKGIEAKIHTLLPWQCTNGSEVQSSWAETTYWISPQGIPETKVQDMDCVYYNWQYLLCSWKPGIGVLLDTNYNLFYWYEGLDHALQCVDYIKADGQNIGCRFPYLEASDYKDFYICVNGSSENKPIRSSYFTFQLQNIVKPLPPVYLTFTRESSCEIKLKWSIPLGPIPARCFDYEIEIREDDTTLVTATVENETYTLKTTNETRQLCFVVRSKVNIYCSDDGIWSEWSDKQCWEGEDLSKKTLLRFWLPFGFILILVIFVTGLLLRKPNTYPKMIPEFFCDT

SEQ ID NO: 300 - protein, 825 aa, Homo sapiens
MGWLCSGLLFPVSCLVLLQVASSGNMKVLQEPTCVSDYMSISTCEWKMNGPTNCSTELRLLYQLVFLLSEAHTCIPENNGGAGCVCHLLMDDVVSADNYTLDLWAGQQLLWKGSFKPSEHVKPRAPGNLTVHTNVSDTLLLTWSNPYPPDNYLYNHLTYAVNIWSENDPADFRIYNVTYLEPSLRIAASTLKSGISYRARVRAWAQCYNTTWSEWSPSTKWHNSYREPFEQHLLLGVSVSCIVILAVCLLCYVSITKIKKEWWDQIPNPARSRLVAIIIQDAQGSQWEKRSRGQEPAKCPHWKNCLTKLLPCFLEHNMKRDEDPHKAAKEMPFQGSGKSAWCPVEISKTVLWPESISVVRCVELFEAPVECEEEEEVEEEKGSFCASPESSRDDFQEGREGIVARLTESLFLDLLGEENGGFCQQDMGESCLLPPSGSTSAHMPWDEFPSAGPKEAPPWGKEQPLHLEPSPPASPTQSPDNLTCTETPLVIAGNPAYRSFSNSLSQSPCPRELGPDPLLARHLEEVEPEMPCVPQLSEPTTVPQPEPETWEQILRRNVLQHGAAAAPVSAPTSGYQEFVHAVEQGGTQASAVVGLGPPGEAGYKAFSSLLASSAVSPEKCGFGASSGEEGYKPFQDLIPGCPGDPAPVPVPLFTFGLDREPPRSPQSSHLPSSSPEHLGLEPGEKVEDMPKPPLPQEQATDPLVDSLGSGIVYSALTCHLCGHLKQCHGQEDGGQTPVMASPCCGCCCGDRSSPPTTPLRAPDPSPGGVPLEASLCPASLAPSGISEKSKSSSSFHPAPGNAQSSSQTPKIVNFVSVGPTYMRVS

SEQ ID NO: 301 - protein, 862 aa, Homo sapiens
MAHTFRGCSLAFMFIITWLLIKAKIDACKRGDVTVKPSHVILLGSTVNITCSLKPRQGCFHYSRRNKLILYKFDRRINFHHGHSLNSQVTGLPLGTTLFVCKLACINSDEIQICGAEIFVGVAPEQPQNLSCIQKGEQGTVACTWERGRDTHLYTEYTLQLSGPKNLTWQKQCKDIYCDYLDFGINLTPESPESNFTAKVTAVNSLGSSSSLPSTFTFLDIVRPLPPWDIRIKFQKASVSRCTLYWRDEGLVLLNRLRYRPSNSRLWNMVNVTKAKGRHDLLDLKPFTEYEFQISSKLHLYKGSWSDWSESLRAQTPEEEPTGMLDVWYMKRHIDYSRQQISLFWKNLSVSEARGKILHYQVTLQELTGGKAMTQNITGHTSWTTVIPRTGNWAVAVSAANSKGSSLPTRINIMNLCEAGLLAPRQVSANSEGMDNILVTWQPPRKDPSAVQEYVVEWRELHPGGDTQVPLNWLRSRPYNVSALISENIKSYICYEIRVYALSGDQGGCSSILGNSKHKAPLSGPHINAITEEKGSILISWNSIPVQEQMGCLLHYRIYWKERDSNSQPQLCEIPYRVSQNSHPINSLQPRVTYVLWMTALTAAGESSHGNEREFCLQGKANWMAFVAPSICIAIIMVGIFSTHYFQQKVFVLLAALRPQWCSREIPDPANSTCAKKYPIAEEKTQLPLDRLLIDWPTPEDPEPLVISEVLHQVTPVFRHPPCSNWPQREKGIQGHQASEKDMMHSASSPPPPRALQAESRQLVDLYKVLESRGSDPKPENPACPWTVLPAGDLPTHDGYLPSNIDDLPSHEAPLADSLEELEPQHISLSVFPSSSLHPLTFSCGDKLTLDQLKMRCDSLML

SEQ ID NO: 302 - protein, 662 aa, Homo sapiens
MEPLVTWVVPLLFLFLLSRQGAACRTSECCFQDPPYPDADSGSASGPRDLRCYRISSDRYECSWQYEGPTAGVSHFLRCCLSSGRCCYFAAGSATRLQFSDQAGVSVLYTVTLWVESWARNQTEKSPEVTLQLYNSVKYEPPLGDIKVSKLAGQLRMEWETPDNQVGAEVQFRHRTPSSPWKLGDCGPQDDDTESCLCPLEMNVAQEFQLRRRQLGSQGSSWSKWSSPVCVPPENPPQPQVRFSVEQLGQDGRRRLTLKEQPTQLELPEGCQGLAPGTEVTYRLQLHMLSCPCKAKATRTLHLGKMPYLSGAAYNVAVISSNQFGPGLNQTWHIPADTHTEPVALNISVGTNGTTMYWPARAQSMTYCIEWQPVGQDGGLATCSLTAPQDPDPAGMATYSWSRESGAMGQEKCYYITIFASAHPEKLTLWSTVLSTYHFGGNASAAGTPHHVSVKNHSLDSVSVDWAPSLLSTCPGVLKEYVVRCRDEDSKQVSEHPVQPTETQVTLSGLRAGVAYTVQVRADTAWLRGVWSQPQRFSIEVQVSDWLIFFASLGSFLSILLVGVLGYLGLNRAARHLCPPLPTPCASSAIEFPGGKETWQWINPVDFQEEASLQEALVVEMSWDKGERTEPLEKTELPEGAPELALDTELSLEDGDRCKAKM

SEQ ID NO: 303 - protein, 521 aa, Homo sapiens
MGLGRCIWEGWTLESEALRRDMGTWLLACICICTCVCLGVSVTGEGQGPRSRTFTCLTNNILRIDCHWSAPELGQGSSPWLLFTSNQAPGGTHKCILRGSECTVVLPPEAVLVPSDNFTITFHHCMSGREQVSLVDPEYLPRRHVKLDPPSDLQSNISSGHCILTWSISPALEPMTTLLSYELAFKKQEEAWEQAQHRDHIVGVTWLILEAFELDPGFIHEARLRVQMATLEDDVVEEERYTGQWSEWSQPVCFQAPQRQGPLIPPWGWPGNTLVAVSIFLLLTGPTYLLFKLSPRVKRIFYQNVPSPAMFFQPLYSVHNGNFQTWMGAHGAGVLLSQDCAGTPQGALEPCVQEATALLTCGPARPWKSVALEEEQEGPGTRLPGNLSSEDVLPAGCTEWRVQTLAYLPQEDWAPTSLTRPAPPDSEGSRSSSSSSSSNNNNYCALGCYGGWHLSALPGNTQSSGPIPALACGLSCDHQGLETQQGVAWVLAGHCQRPGLHEDLQGMLLPSVLSKARSWTF

SEQ ID NO: 304 - protein, 578 aa, Homo sapiens
MLPCLVVLLAALLSLRLGSDAHGTELPSPPSVWFEAEFFHHILHWTPIPNQSESTCYEVALLRYGIESWNSISNCSQTLSYDLTAVTLDLYHSNGYRARVRAVDGSRHSNWTVTNTRFSVDEVTLTVGSVNLEIHNGFILGKIQLPRPKMAPANDTYESIFSHFREYEIAIRKVPGNFTFTHKKVKHENFSLLTSGEVGEFCVQVKPSVASRSNKGMWSKEECISLTRQYFTVTNVIIFFAFVLLLSGALAYCLALQLYVRRRKKLPSVLLFKKPSPFIFISQRPSPETQDTIHPLDEEAFLKVSPELKNLDLHGSTDSGFGSTKPSLQTEEPQFLLPDPHPQADRTLGNREPPVLGDSCSSGSSNSTDSGICLQEPSLSPSTGPTWEQQVGSNSRGQDDSGIDLVQNSEGRAGDTQGGSALGHHSPPEPEVPGEEDPAAVAFQGYLRQTRCAEEKATKTGCLEEESPLTDGLGPKFGRCLVDEAGLHPPALAKGYLKQDPLEMTLASSGAPTGQWNQPTEEWSLLALSSCSDLGISDWSFAHDLAPLGCVAAPGGLLGSFNSDLVTLPLISSLQSSE

SEQ ID NO: 305 - protein, 325 aa, Homo sapiens
MAWSLGSWLGGCLLVSALGMVPPPENVRMNSVNFKNILQWESPAFAKGNLTFTAQYLSYRIFQDKCMNTTLTECDFSSLSKYGDHTLRVRAEFADEHSDWVNITFCPVDDTIIGPPGMQVEVLADSLHMRFLAPKIENEYETWTMKNVYNSWTYNVQYWKNGTDEKFQITPQYDFEVLRNLEPWTTYCVQVRGFLPDRNKAGEWSEPVCEQTTHDETVPSWMVAVILMASVFMVCLALLGCFALLWCVYKKTKYAFSPRNSLPQHLKEFLGHPHHNTLLFFSFPLSDENDVFDKLSVIAEDSESGKQNPGDSCSLGTPPGQGPQS

SEQ ID NO: 306 - protein, 468 aa, Homo sapiens
MLAVGCALLAALLAAPGAALAPRRCPAQEVARGVLTSLPGDSVTLTCPGVEPEDNATVHWVLRKPAAGSHPSRWAGMGRRLLLRSVQLHDSGNYSCYRAGRPAGTVHLLVDVPPEEPQLSCFRKSPLSNVVCEWGPRSTPSLTTKAVLLVRKFQNSPAEDFQEPCQYSQESQKFSCQLAVPEGDSSFYIVSMCVASSVGSKFSKTQTFQGCGILQPDPPANITVTAVARNPRWLSVTWQDPHSWNSSFYRLRFELRYRAERSKTFTTWMVKDLQHHCVIHDAWSGLRHVVQLRAQEEFGQGEWSEWSPEAMGTPWTESRSPPAENEVSTPMQALTTNKDDDNILFRDSANATSLPVQDSSSVPLPTFLVAGGSLAFGTLLCIAIVLRFKKTWKLRALKEGKTSMHPPYSLGQLVPERPRPTPVLVPLISPPVSPSSLGSDNTSSHNRPDARDPRSPYDISNTDYFFPR

SEQ ID NO: 307 - protein, 378 aa, Homo sapiens
MVLLWLTLLLIALPCLLQTKEDPNPPITNLRMKAKAQQLTWDLNRNVTDIECVKDADYSMPAVNNSYCQFGAISLCEVTNYTVRVANPPFSTWILFPENSGKPWAGAENLTCWIHDVDFLSCSWAVGPGAPADVQYDLYLNVANRRQQYECLHYKTDAQGTRIGCRFDDISRLSSGSQSSHILVRGRSAAFGIPCTDKFVVFSQIEILTPPNMTAKCNKTHSFMHWKMRSHFNRKFRYELQIQKRMQPVITEQVRDRTSFQLLNPGTYTVQIRARERVYEFLSAWSTPQRFECDQEEGANTRAWRTSLLIALGTLLALVCVFVICRRYLVMQRLFPRIPHMKDPIGDSFQNDKLVVWEAGKAGLEECLVTEVQVVQKT

SEQ ID NO: 308 - protein, 400 aa, Homo sapiens
MLLLVTSLLLCELPHPAFLLIPEKSDLRTVAPASSLNVRFDSRTMNLSWDCQENTTFSKCFLTDKKNRVVEPRLSNNECSCTFREICLHEGVTFEVHVNTSQRGFQQKLLYPNSGREGTAAQNFSCFIYNADLMNCTWARGPTAPRDVQYFLYIRNSKRRREIRCPYYIQDSGTHVGCHLDNLSGLTSRNYFLVNGTSREIGIQFFDSLLDTKKIERFNPPSNVTVRCNTTHCLVRWKQPRTYQKLSYLDFQYQLDVHRKNTQPGTENLLINVSGDLENRYNFPSSEPRAKHSVKIRAADVRILNWSSWSEAIEFGSDDGNLGSVYIYVLLIVGTLVCGIVLGFLFKRFLRIQRLFPPVPQIKDKLNDNHEVEDEIIWEEFTPEEGKGYREEVLTVKEIT

SEQ ID NO: 309 - protein, 897 aa, Homo sapiens
MVLAQGLLSMALLALCWERSLAGAEETIPLQTLRCYNDYTSHITCRWADTQDAQRLVNVTLIRRVNEDLLEPVSCDLSDDMPWSACPHPRCVPRRCVIPCQSFVVTDVDYFSFQPDRPLGTRLTVTLTQHVQPPEPRDLQISTDQDHFLLTWSVALGSPQSHWLSPGDLEFEVVYKRLQDSWEDAAILLSNTSQATLGPEHLMPSSTYVARVRTRLAPGSRLSGRPSKWSPEVCWDSQPGDEAQPQNLECFFDGAAVLSCSWEVRKEVASSVSFGLFYKPSPDAGEEECSPVLREGLGSLHTRHHCQIPVPDPATHGQYIVSVQPRRAEKHIKSSVNIQMAPPSLNVTKDGDSYSLRWETMKMRYEHIDHTFEIQYRKDTATWKDSKTETLQNAHSMALPALEPSTRYWARVRVRTSRTGYNGIWSEWSEARSWDTESVLPMWVLALIVIFLTIAVLLALRFCGIYGYRLRRKWEEKIPNPSKSHLFQNGSAELWPPGSMSAFTSGSPPHQGPWGSRFPELEGVFPVGFGDSEVSPLTIEDPKHVCDPPSGPDTTPAASDLPTEQPPSPQPGPPAASHTPEKQASSFDFNGPYLGPPHSRSLPDILGQPEPPQEGGSQKSPPPGSLEYLCLPAGGQVQLVPLAQAMGPGQAVEVERRPSQGAAGSPSLESGGGPAPPALGPRVGGQDQKDSPVAIPMSSGDTEDPGVASGYVSSADLVFTPNSGASSVSLVPSLGLPSDQTPSLCPGLASGPPGAPGPVKSGFEGYVELPPIEGRSPRSPRNNPVPPEAKSPVLNPGERPADVSPTSPQPEGLLVLQQVGDYCFLPGLGPGPLSLRSKPSSPGPGPEIKNLDQAFQVKKPPGQAVPQVPVIQLFKALKQQDYLSLPPWEVNKPGEVC

SEQ ID NO: 310 - protein, 420 aa, Homo sapiens
MIIVAHVLLILLGATEILQADLLPDEKISLLPPVNFTIKVTGLAQVLLQWKPNPDQEQRNVNLEYQVKINAPKEDDYETRITESKCVTILHKGFSASVRTILQNDHSLLASSWASAELHAPPGSPGTSIVNLTCTTNTTEDNYSRLRSYQVSLHCTWLVGTDAPEDTQYFLYYRYGSWTEECQEYSKDTLGRNIACWFPRTFILSKGRDWLAVLVNGSSKHSAIRPFDQLFALHAIDQINPPLNVTAEIEGTRLSIQWEKPVSAFPIHCFDYEVKIHNTRNGYLQIEKLMTNAFISIIDDLSKYDVQVRAAVSSMCREAGLWSEWSQPIYVGNDEHKPLREWFVIVIMATICFILLILSLICKICHLWIKLFPPIPAPKSNIKDLFVTTNYEKAGSSETEIEVICYIEKPGVETLEDSVF

SEQ ID NO: 311 - protein, 459 aa, Homo sapiens [sequence omitted]

SEQ ID NO: 312 - protein, 508 aa, Homo sapiens
MDHLGASLWPQVGSLCLLLAGAAWAPPPNLPDPKFESKAALLAARGPEELLCFTERLEDLVCFWEEAASAGVGPGNYSFSYQLEDEPWKLCRLHQAPTARGAVRFWCSLPTADTSSFVPLELRVTAASGAPRYHRVIHINEVVLLDAPVGLVARLADESGHVVLRWLPPPETPMTSHIRYEVDVSAGNGAGSVQRVEILEGRTECVLSNLRGRTRYTFAVRARMAEPSFGGFWSAWSEPVSLLTPSDLDPLILTLSLILVVILVLLTVLALLSHRRALKQKIWPGIPSPESEFEGLFTTHKGNFQLWLYQNDGCLWWSPCTPFTEDPPASLEVLSERCWGTMQAVEPGTDDEGPLLEPVGSEHAQDTYLVLDKWLLPRNPPSEDLPGPGGSVDIVAMDEGSEASSCSSALASKPSPEGASAASFEYTILDPSSQLLRPWTLCPELPPTPPHLKYLYLVVSDSGISTDYSSGDSQGAQGGLSDGPYSNPYENSLIPAAEPLPPSYVACS

SEQ ID NO: 313 - protein, 267 aa, Homo sapiens
MAPRRARGCRTLGLPALLLLLLLRPPATRGITCPPPMSVEHADIWVKSYSLYSRERYICNSGFKRKAGTSSLTECVLNKATNVAHWTTPSLKCIRDPALVHQRPAPPSTVTTAGVTPQPESLSPSGKEPAASSPSSNNTAATTAAIVPGSQLMPSKSPSTGTTEISSHESSHGTPSQTTAKNWELTASASHQPPGVYPQGHSDTTVAISTSTVLLCGLSAVSLLACYLKSRQTPPLASVEMEAMEALPVTWGTSSRDEDLENCSHHL

SEQ ID NO: 314 - protein, 255 aa, Homo sapiens
MGNSCYNIVATLLLVLNFERTRSLQDPCSNCPAGTFCDNNRNQICSPCPPNSFSSAGGQRTCDICRQCKGVFRTRKECSSTSNAECDCTPGFHCLGAGCSMCEQDCKQGQELTKKGCKDCCFGTFNDQKRGICRPWTNCSLDGKSVLVNGTKERDVVCGPSPADLSPGASSVTPPAPAREPGHSPQIISFFLALTSTALLFLLFFLTLRFSVVKRGRKKLLYIFKQPFMRPVQTTQEEDGCSCRFPEEEEGGCEL

SEQ ID NO: 315 - protein, 184 aa, Homo sapiens
MLQMAGQCSQNEYFDSLLHACIPCQLRCSSNTPPLTCQRYCNASVTNSVKGTNAILWTCLGLSLIISLAVFVLMFLLRKINSEPLKDEFKNTGSGLLGMANIDLEKSRTGDEIILPRGLEYTVEECTCEDCIKSKPKVDSDHCFPLPAMEEGATILVTTKTNDYCKSLPAALSATEIEKSISAR

SEQ ID NO: 316 - protein, 260 aa, Homo sapiens
MARPHPWWLCVLGTLVGLSATPAPKSCPERHYWAQGKLCCQMCEPGTFLVKDCDQHRKAAQCDPCIPGVSFSPDHHTRPHCESCRHCNSGLLVRNCTITANAECACRNGWQCRDKECTECDPLPNPSLTARSSQALSPHPQPTHLPYVSEMLEARTAGHMQTLADFRQLPARTLSTHWPPQRSLCSSDFIRILVIFSGMFLVFTLAGALFLHQRRKYRSNKGESPVEPAEPCHYSCPREEEGSTIPIQEDYRKPEPACSP

SEQ ID NO: 317 - protein, 595 aa, Homo sapiens
MRVLLAALGLLFLGALRAFPQDRPFEDTCHGNPSHYYDKAVRRCCYRCPMGLFPTQQCPQRPTDCRKQCEPDYYLDEADRCTACVTCSRDDLVEKTPCAWNSSRVCECRPGMFCSTSAVNSCARCFFHSVCPAGMIVKFPGTAQKNTVCEPASPGVSPACASPENCKEPSSGTIPQAKPTPVSPATSSASTMPVRGGTRLAQEAASKLTRAPDSPSSVGRPSSDPGLSPTQPCPEGSGDCRKQCEPDYYLDEAGRCTACVSCSRDDLVEKTPCAWNSSRTCECRPGMICATSATNSCARCVPYPICAAETVTKPQDMAEKDTTFEAPPLGTQPDCNPTPENGEAPASTSPTQSLLVDSQASKTLPIPTSAPVALSSTGKPVLDAGPVLFWVILVLVVVVGSSAFLLCHRRACRKRIRQKLHLCYPVQTSQPKLELVDSRPRRSSTQLRSGASVTEPVAEERGLMSQPLMETCHSVGAAYLESLPLQDASPAGGPSSPRDLPEPRVSTEHTNNKIEKIYIMKADTVIVGTVKAELPEGRGLAGPAEPELEEELEADHTPHYPEQETEPPLGSCSDVMLSVEEEGKEDPLPTAASGK

SEQ ID NO: 318 - protein, 277 aa, Homo sapiens
MVRLPLQCVLWGCLLTAVHPEPPTACREKQYLINSQCCSLCQPGQKLVSDCTEFTETECLPCGESEFLDTWNRETHCHQHKYCDPNLGLRVQQKGTSETDTICTCEEGWHCTSEACESCVLHRSCSPGFGVKQIATGVSDTICEPCPVGFFSNVSSAFEKCHPWTSCETKDLVVQQAGTNKTDVVCGPQDRLRALVVIPIIFGILFAILLVLVFIKKVAKKPTNKAPHPKQEPQEINFPDDLPGSNTAAPVQETLHGCQPVTQEDGKESRISVQERQ

SEQ ID NO: 319 - protein, 448 aa, Homo sapiens
MAHVGDCTQTPWLPVLVVSLMCSARAEYSNCGENEYYNQTTGLCQECPPCGPGEEPYLSCGYGTKDEDYGCVPCPAEKFSKGGYQICRRHKDCEGFFRATVLTPGDMENDAECGPCLPGYYMLENRPRNIYGMVCYSCLLAPPNTKECVGATSGASANFPGTSGSSTLSPFQHAHKELSGQGHLATALIIAMSTIFIMAIAIVLIIMFYILKTKPSAPACCTSHPGKSVEAQVSKDEEKKEAPDNVVMFSEKDEFEKLTATPAKPTKSENDASSENEQLLSRSVDSDEEPAPDKQGSPELCLLSLVHLAREKSATSNKSAGIQSRRKKILDVYANVCGVVEGLSPTELPFDCLEKTSRMLSSTYNSEKAVVKTWRHLAESFGLKRDEIGGMTDGMQLFDRISTAGYSIPELLTKLVQIERLDAVESLCADILEWAGVVPPASQPHAAS

SEQ ID NO: 320 - protein, 277 aa, Homo sapiens
MCVGARRLGRGPCAALLLLGLGLSTVTGLHCVGDTYPSNDRCCHECRPGNGMVSRCSRSQNTVCRPCGPGFYNDVVSSKPCKPCTWCNLRSGSERKQLCTATQDTVCRCRAGTQPLDSYKPGVDCAPCPPGHFSPGDNQACKPWTNCTLAGKHTLQPASNSSDAICEDRDPPATQPQETQGPPARPITVQPTEAWPRTSQGPSTRPVEVPGGRAVAAILGLGLVLGLLGPLAILLALYLLRRDQRLPPDAHKPPGGGSFRTPIQEEQADAHSTLAKI

SEQ ID NO: 321 - protein, 293 aa, Homo sapiens
MSGLGRSRRGGRSRVDQEERFPQGLWTGVAMRSCPEEQYWDPLLGTCMSCKTICNHQSQRTCAAFCRSLSCRKEQGKFYDHLLRDCISCASICGQHPKQCAYFCENKLRSPVNLPPELRRQRSGEVENNSDNSGRYQGLEHRGSEASPALPGLKLSADQVALVYSTLGLCLCAVLCCFLVAVACFLKKRGDPCSCQPRSRPRQSPAKSSQDHAMEAGSPVSTSPEPVETCSFCFPECRAPTQESAVTPGTPDPTCAGRWGCHTRTTVLQPCPHIPDSGLGIVCVPAQEGGPGA

SEQ ID NO: 322 - protein, 455 aa, Homo sapiens
MGLSTVPDLLLPLVLLELLVGIYPSGVIGLVPHLGDREKRDSVCPQGKYIHPQNNSICCTKCHKGTYLYNDCPGPGQDTDCRECESGSFTASENHLRHCLSCSKCRKEMGQVEISSCTVDRDTVCGCRKNQYRHYWSENLFQCFNCSLCLNGTVHLSCQEKQNTVCTCHAGFFLRENECVSCSNCKKSLECTKLCLPQIENVKGTEDSGTTVLLPLVIFFGLCLLSLLFIGLMYRYQRWKSKLYSIVCGKSTPEKEGELEGTTTKPLAPNPSFSPTPGFTPTLGFSPVPSSTFTSSSTYTPGDCPNFAAPRREVAPPYQGADPILATALASDPIPNPLQKWEDSAHKPQSLDTDDPATLYAVVENVPPLRWKEFVRRLGLSDHEIDRLELQNGRCLREAQYSMLATWRRRTPRREATLELLGRVLRDMDLLGCLEDIEEALCGPAALPPAPSLLR

SEQ ID NO: 323 - protein, 461 aa, Homo sapiens
MAPVAVWAALAVGLELWAAAHALPAQVAFTPYAPEPGSTCRLREYYDQTAQMCCSKCSPGQHAKVFCTKTSDTVCDSCEDSTYTQLWNWVPECLSCGSRCSSDQVETQACTREQNRICTCRPGWYCALSKQEGCRLCAPLRKCRPGFGVARPGTETSDVVCKPCAPGTFSNTTSSTDICRPHQICNVVAIPGNASMDAVCTSTSPTRSMAPGAVHLPQPVSTRSQHTQPTPEPSTAPSTSFLLPMGPSPPAEGSTGDFALPVGLIVGVTALGLLIIGVVNCVIMTQVKKKPLCLQREAKVPHLPADKARGTQGPEQQHLLITAPSSSSSSLESSASALDRRAPTRNQPQAPGVEASGAGEARASTGSSDSSPGGHGTQVNVTCIVNVCSSSDHSSQCSSQASSTMGDTDSSPSESPKDEQVPFSKEECAFRSQLETPETLLGSTEEKPLPLGVPDAGMKPS

SEQ ID NO: 324 - protein, 423 aa, Homo sapiens
MALKVLLEQEKTFFTLLVLLGYLSCKVTCESGDCRQQEFRDRSGNCVPCNQCGPGMELSKECGFGYGEDAQCVTCRLHRFKEDWGFQKCKPCLDCAVVNRFQKANCSATSDAICGDCLPGFYRKTKLVGFQDMECVPCGDPPPPYEPHCASKVNLVKIASTASSPRDTALAAVICSALATVLLALLILCVIYCKRQFMEKKPSWSLRSQDIQYNGSELSCFDRPQLHEYAHRACCQCRRDSVQTCGPVRLLPSMCCEEACSPNPATLGCGVHSAASLQARNAGPAGEMVPTFFGSLTQSICGEFSDAWPLMQNPMGGDNISFCDSYPELTGEDIHSLNPELESSTSLDSNSSQDLVGGAVPVQSHSENFTAATDLSRYNNTLVESASTQDALTMRSQLDQESGAVIHPATQTSLQVRQRLGSL

SEQ ID NO: 325 - protein, 233 aa, Homo sapiens
MSTESMIRDVELAEEALPKKTGGPQGSRRCLFLSLFSFLIVAGATTLFCLLHFGVIGPQREEFPRDLSLISPLAQAVRSSSRTPSDKPVAHVVANPQAEGQLQWLNRRANALLANGVELRDNQLVVPSEGLYLIYSQVLFKGQGCPSTHVLLTHTISRIAVSYQTKVNLLSAIKSPCQRETPEGAEAKPWYEPIYLGGVFQLEKGDRLSAEINRPDYLDFAESGQVYFGIIAL

SEQ ID NO: 326 - protein, 205 aa, Homo sapiens
MTPPERLFLPRVCGTTLHLLLLGLLLVLLPGAQGLPGVGLTPSAAQTARQHPKMHLAHSTLKPAAHLIGDPSKQNSLLWRANTDRAFLQDGFSLSNNSLLVPTSGIYFVYSQVVFSGKAYSPKATSSPLYLAHEVQLFSSQYPFHVPLLSSQKMVYPGLQEPWLHSMYHGAAFQLTQGDQLSTHTDGIPHLVLSPSTVFFGAFAL

SEQ ID NO: 327 - protein, 244 aa, Homo sapiens
MGALGLEGRGGRLQGRGSLLLAVAGATSLVTLLLAVPITVLAVLALVPQDQGGLVTETADPGAQAQQGLGFQKLPEEEPETDLSPGLPAAHLIGAPLKGQGLGWETTKEQAFLTSGTQFSDAEGLALPQDGLYYLYCLVGYRGRAPPGGGDPQGRSVTLRSSLYRAGGAYGPGTPELLLEGAETVTPVLDPARRQGYGPLWYTSVGFGGLVQLRRGERVYVNISHPDMVDFARGKTFFGAVMVG

SEQ ID NO: 328 - protein, 317 aa, Homo sapiens
MRRASRDYTKYLRGSEEMGGGPGAPHEGPLHAPPPPAPHQPPAASRSMFVALLGLGLGQVVCSVALFFYFRAQMDPNRISEDGTHCIYRILRLHENADFQDTTLESQDTKLIPDSCRRIKQAFQGAVQKELQHIVGSQHIRAEKAMVDGSWLDLAKRSKLEAQPFAHLTINATDIPSGSHKVSLSSWYHDRGWAKISNMTFSNGKLIVNQDGFYYLYANICFRHHETSGDLATEYLQLMVYVTKTSIKIPSSHTLMKGGSTKYWSGNSEFHFYSINVGGFFKLRSGEEISIEVSNPSLLDPDQDATYFGAFKVRDID

SEQ ID NO: 329 - protein, 281 aa, Homo sapiens; identical to SEQ ID NO: 204

SEQ ID NO: 330 - protein, 193 aa, Homo sapiens
MPEEGSGCSVRRRPYGCVLRAALVPLVAGLVICLVVCIQRFAQAQQQLPLESLGWDVAELQLNHTGPQQDPRLYWQGGPALGRSFLHGPELDKGQLRIHRDGIYMVHIQVTLAICSSTTASRHHPTTLAVGICSPASRSISLLRLSFHQGCTIASQRLTPLARGDTLCTNLTGTLLPSRNTDETFFGVQWVRP

SEQ ID NO: 331 - protein, 234 aa, Homo sapiens
MDPGLQQALNGMAPPGDTAMHVPAGSVASHLGTTSRSYFYLTTATLALCLVFTVATIMVLVVQRTDSIPNSPDNVPLKGGNCSEDLLCILKRAPFKKSWAYLQVAKHLNKTKLSWNKDGILHGVRYQDGNLVIQFPGLYFIICQLQFLVQCPNNSVDLKLELLINKHIKKQALVTVCESGMQTKHVYQNLSQFLLDYLQVNTTISVNVDTFQYIDTSTFPLENVLSIFLYSNSD

SEQ ID NO: 332 - protein, 261 aa, Homo sapiens
MIETYNQTSPRSAATGLPISMKIFMYLLTVFLITQMIGSALFAVYLHRRLDKIEDERNLHEDFVFMKTIQRCNTGERSLSLLNCEEIKSQFEGFVKDIMLNKEETKKENSFEMQKGDQNPQIAAHVISEASSKTTSVLQWAEKGYYTMSNNLVTLENGKQLTVKRQGLYYIYAQVTFCSNREASSQAPFIASLCLKSPGRFERILLRAANTHSSAKPCGQQSIHLGGVFELQPGASVFVNVTDPSQVSHGTGFTSFGLLKL

SEQ ID NO: 333 - protein, 254 aa, Homo sapiens
MEYASDASLDPEAPWPPAPRARACRVLPWALVAGLLLLLLLAAACAVFLACPWAVSGARASPGSAASPRLREGPELSPDDPAGLLDLRQGMFAQLVAQNVLLIDGPLSWYSDPGLAGVSLTGGLSYKEDTKELVVAKAGVYYVFFQLELRRVVAGEGSGSVSLALHLQPLRSAAGAAALALTVDLPPASSEARNSAFGFQGRLLHLSAGQRLGVHLHTEARARHAWQLTQGATVLGLFRVTPEIPAGLPSPRSE

SEQ ID NO: 334 - protein, 300 aa, Homo sapiens
MRALEGPGLSLLCLVLALPALLPVPAVRGVAETPTYPWRDAETGERLVCAQCPPGTFVQRPCRRDSPTTCGPCPPRHYTQFWNYLERCRYCNVLCGEREEEARACHATHNRACRCRTGFFAHAGFCLEHASCPPGAGVIAPGTPSQNTQCQPCPPGTFSASSSSSEQCQPHRNCTALGLALNVPGSSSHDTLCTSCTGFPLSTRVPGAEECERAVIDFVAFQDISIKRLQRLLQALEAPEGWGPTPRAGRAALQLKLRRRLTELLGAQDGALLVRLLQALRVARMPGLERSVRERFLPVH

SEQ ID NO: 335 - protein, 183 aa, Homo sapiens
MERVQPLEENVGNAARPRFERNKLLLVASVIQGLGLLLCFTYICLHFSALQVSHRYPRIQSIKVQFTEYKKEKGFILTSQKEDEIMKVQNNSVIINCDGFYLISLKGYFSQEVNISLHYQKDEEPLFQLKKVRSVNSLMVASLTYKDKVYLNVTTDNTSLDDFHVNGGELILIHQNPGEFCVL

SEQ ID NO: 336 - protein, 99 aa, Homo sapiens
MKASAALLCLLLTAAAFSPQGLAQPVGINTSTTCCYRFINKKIPKQRLESYRRTTSSHCPREAVIFKTKLDKEICADPTQKWVQDFMKHLDKKTQTPKL

SEQ ID NO: 337 - protein, 99 aa, Homo sapiens
MKVSAALLCLLLIAATFIPQGLAQPDAINAPVTCCYNFTNRKISVQRLASYRRITSSKCPKEAVIFKTIVAKEICADPKQKWVQDSMDHLDKQTQTPKT

SEQ ID NO: 338 - protein, 107 aa, Homo sapiens
MARATLSAAPSNPRLLRVALLLLLLVAASRRAAGAPLATELRCQCLQTLQGIHLKNIQSVKVKSPGPHCAQTEVIATLKNGQKACLNPASPMVKKIIEKMLKNGKSN

SEQ ID NO: 339 - protein, 107 aa, Homo sapiens
MAHATLSAAPSNPRLLRVALLLLLLVAASRRAAGASVVTELRCQCLQTLQGIHLKNIQSVNVRSPGPHCAQTEVIATLKNGKKACLNPASPMVQKIIEKILNKGSTN

SEQ ID NO: 340 - protein, 107 aa, Homo sapiens
MARAALSAAPSNPRLLRVALLLLLLVAAGRRAAGASVATELRCQCLQTLQGIHPKNIQSVNVKSPGPHCAQTEVIATLKNGRKACLNPASPIVKKIIEKMLNSDKSN

SEQ ID NO: 341 - protein, 99 aa, Homo sapiens
MTSKLAVALLAAFLISAALCEGAVLPRSAKELRCQCIKTYSKPFHPKFIKELRVIESGPHCANTEIIVKLSDGRELCLDPKENWVQRVVEKFLKRAENS

SEQ ID NO: 342 - protein, 113 aa, Homo sapiens
MKVSVAALSCLMLVAVLGSQAQFINDAETELMMSKLPLENPVVLNSFHFAADCCTSYISQSIPCSLMKSYFETSSECSKPGVIFLTKKGRQVCAKPSGPGVQDCMKKLKPYSI

SEQ ID NO: 343 - protein, 93 aa, Homo sapiens
MKISVAAIPFFLLITIALGTKTESSSRGPYHPSECCFTYTTYKIPRQRIMDYYETNSQCSKPGIVFITKRGHSVCTNPSDKWVQDYIKDMKEN

SEQ ID NO: 344 - protein, 99 aa, Homo sapiens
MKVSAALLCLLLMAATFSPQGLAQPDSVSIPITCCFNVINRKIPIQRLESYTRITNIQCPKEAVIFKTKRGKEVCADPKERWVRDSMKHLDQIFQNLKP

SEQ ID NO: 345 - protein, 93 aa, Homo sapiens
MDRLQTALLVVLVLLAVALQATEAGPYGANMEDSVCCRDYVRYRLPLRVVKHFYWTSDSCPRPGVVLLTFRDKEICADPRVPWVKMILNKLSQ

SEQ ID NO: 346 - protein, 134 aa, Homo sapiens; identical to SEQ ID NO: 246

SEQ ID NO: 347 - protein, 98 aa, Homo sapiens
MKVSAVLLCLLLMTAAFNPQGLAQPDALNVPSTCCFTFSSKKISLQRLKSYVITTSRCPQKAVIFRTKLGKEICADPKEKWVQNYMKHLGRKAHTLKT

SEQ ID NO: 348 - protein, 150 aa, Homo sapiens
MNLWLLACLVAGFLGAWAPAVHTQGVFEDCCLAYHYPIGWAVLRRAWTYRIQEVSGSCNLPAAIFYLPKRHRKVCGNPKSREVQRAMKLLDARNKVFAKLHHNTQTFQAGPHAVKKLSSGNSKLSSSKFSNPISSSKRNVSLLISANSGL

SEQ ID NO: 349 - protein, 94 aa, Homo sapiens
MMGLSLASAVLLASLLSLHLGTATRGSDISKTCCFQYSHKPLPWTWVRSYEFTSNSCSQRAVIFTTKRGKKVCTHPRKKWVQKYISLLKTPKQL

SEQ ID NO: 350 - protein, 111 aa, Homo sapiens
MSLLPRRAPPVSMRLLAAALLLLLLALYTARVDGSKCKCSRKGPKIRYSDVKKLEMKPKYPHCEEKMVIITTKSVSRYRGQEHCLHPKLQSTKRFIKWYNAWNEKRRVYEE

SEQ ID NO: 351 - protein, 125 aa, Homo sapiens
MKKSGVLFLLGIILLVLIGVQGTPVVRKGRCSCISTNQGTIHLQSLKDLKQFAPSPSCEKIEIIATLKNGVQTCLNPDSADVKELIKKWEKQVSQKKKQKNGKKHQKKKVLKVRKSQRSRQKKTT

SEQ ID NO: 352 - protein, 114 aa, Homo sapiens
MSLLSSRAARVPGPSSSLCALLVLLLLLTQPGPIASAGPAAAVLRELRCVCLQTTQGVHPKMISNLQVFAIGPQCSKVEVVASLKNGKEICLDPEAPFLKKVIQKILDGGNKEN

SEQ ID NO: 353 - protein, 128 aa, Homo sapiens
MSLRLDTTPSCNSARPLHALQVLLLLSLLLTALASSTKGQTKRNLAKGKEESLDSDLYAELRCMCIKTTSGIHPKNIQSLEVIGKGTHCNQVEVIATLKDGRKICLDPDAPRIKKIVQKKLAGDESAD

SEQ ID NO: 354 - protein, 85 aa, Homo sapiens
NLAKGKEESLDSDLYAELRCMCIKTTSGIHPKNIQSLEVIGKGTHCNQVEVIATLKDGRKICLDPDAPRIKKIVQKKLAGDESAD

SEQ ID NO: 355 - protein, 81 aa, Homo sapiens
GKEESLDSDLYAELRCMCIKTTSGIHPKNIQSLEVIGKGTHCNQVEVIATLKDGRKICLDPDAPRIKKIVQKKLAGDESAD

SEQ ID NO: 356 - protein, 70 aa, Homo sapiens
AELRCMCIKTTSGIHPKNIQSLEVIGKGTHCNQVEVIATLKDGRKICLDPDAPRIKKIVQKKLAGDESAD

SEQ ID NO: 357 - protein, 114 aa, Homo sapiens
MSLPSSRAARVPGPSGSLCALLALLLLLTPPGPLASAGPVSAVLTELRCTCLRVTLRVNPKTIGKLQVFPAGPQCSKVEVVASLKNGKQVCLDPEAPFLKKVIQKILDSGNKKN

SEQ ID NO: 358 - protein, 92 aa, Homo sapiens
MKLCVTVLSLLMLVAAFCSPALSAPMGSDPPTACCFSYTARKLPRNFVVDYYETSSLCSQPAVVFQTKRSKQVCADPSESWVQEYVYDLELN

SEQ ID NO: 359 - protein, 101 aa, Homo sapiens
MSSAAGFCASRPGLLFLGLLLLPLVVAFASAEAEEDGDLQCLCVKTTSQVRPRHITSLEVIKAGPHCPTAQLIATLKNGRKICLDLQAPLYKKIIKKLLES

SEQ ID NO: 360 - protein, 96 aa, Homo sapiens
MQIITTALVCLLLAGMWPEDVDSKSMQVPFSRCCFSFAEQEIPLRAILCYRNTSSICSNEGLIFKLKRGKEACALDTVGWVQRHRKMLRHCPSKRK

SEQ ID NO: 361 - protein, 93 aa, Homo sapiens; identical to SEQ ID NO: 343

SEQ ID NO: 362 - protein, 374 aa, Homo sapiens
MLSTSRSRFIRNTNESGEEVTTFFDYDYGAPCHKFDVKQIGAQLLPPLYSLVFIFGFVGNMLVVLILINCKKLKCLTDIYLLNLAISDLLFLITLPLWAHSAANEWVFGNAMCKLFTGLYHIGYFGGIFFIILLTIDRYLAIVHAVFALKARTVTFGVVTSVITWLVAVFASVPGIIFTKCQKEDSVYVCGPYFPRGWNNFHTIMRNILGLVLPLLIMVICYSGILKTLLRCRNEKKRHRAVRVIFTIMIVYFLFWTPYNIVILLNTFQEFFGLSNCESTSQLDQATQVTETLGMTHCCINPIIYAFVGEKFRSLFHIALGCRIAPLQKPVCGGPGVRPGKNVKVTTQGLLDGRGKGKSIGRAPEASLQDKEGA

SEQ ID NO: 363 - protein, 94 aa, Homo sapiens
MSVKGMAIALAVILCATVVQGFPMFKRGRCLCIGPGVKAVKVADIEKASIMYPSNNCDKIEVIITLKENKGQRCLNPKSKQARLIIKKVERKNF

SEQ ID NO: 364 - protein, 92 aa, Homo sapiens
MQVSTAALAVLLCTMALCNQFSASLAADTPTACCFSYTSRQIPQNFIADYFETSSQCSKPGVIFLTKRSRQVCADPSEEWVQKYVSDLELSA

SEQ ID NO: 365 - protein, 180 aa, Homo sapiens
MLCLLLTLGVALVCGVPAMDIPQTKQDLELPKLAGTWHSMAMATNNISLMATLKAPLRVHITSLLPTPEDNLEIVLHRWENNSCVEKKVLGEKTENPKKFKINYTVANEATLLDTDYDNFLFLCLQDTTTPIQSMMCQYLARVLVEDDEIMQGFIRAFRPLPRHLWYLLDLKQMEEPCRF

SEQ ID NO: 366 - protein, 1192 aa, Homo sapiens [sequence omitted]

SEQ ID NO: 367 - protein, 373 aa, Homo sapiens
MEDLDQSPLVSSSDSPPRPQPAFKYQFVREPEDEEEEEEEEEEDEDEDLEELEVLERKPAAGLSAAPVPTAPAAGAPLMDFGNDFVPPAPRGPLPAAPPVAPERQPSWDPSPVSSTVPAPSPLSAAAVSPSKLPEDDEPPARPPPPPPASVSPQAEPVWTPPAPAPAAPPSTPAAPKRRGSSGSVVVDLLYWRDIKKTGVVFGASLFLLLSLTVFSIVSVTAYIALALLSVTISFRIYKGVIQAIQKSDEGHPFRAYLESEVAISEELVQKYSNSALGHVNCTIKELRRLFLVDDLVDSLKFAVLMWVFTYVGALFNGLTLLILALISLFSVPVIYERHQAQIDHYLGLANKNVKDAMAKIQAKIPGLKRKAE

SEQ ID NO: 368 - protein, 199 aa, Homo sapiens
MDGQKKNWKDKVVDLLYWRDIKKTGVVFGASLFLLLSLTVFSIVSVTAYIALALLSVTISFRIYKGVIQAIQKSDEGHPFRAYLESEVAISEELVQKYSNSALGHVNCTIKELRRLFLVDDLVDSLKFAVLMWVFTYVGALFNGLTLLILALISLFSVPVIYERHQAQIDHYLGLANKNVKDAMAKIQAKIPGLKRKAE

SEQ ID NO: 369 - protein, 473 aa, Homo sapiens
MKRASAGGSRLLAWVLWLQAWQVAAPCPGACVCYNEPKVTTSCPQQGLQAVPVGIPAASQRIFLHGNRISHVPAASFRACRNLTILWLHSNVLARIDAAAFTGLALLEQLDLSDNAQLRSVDPATFHGLGRLHTLHLDRCGLQELGPGLFRGLAALQYLYLQDNALQALPDDTFRDLGNLTHLFLHGNRISSVPERAFRGLHSLDRLLLHQNRVAHVHPHAFRDLGRLMTLYLFANNLSALPTEALAPLRALQYLRLNDNPWVCDCRARPLWAWLQKFRGSSSEVPCSLPQRLAGRDLKRLAANDLQGCAVATGPYHPIWTGRATDEEPLGLPKCCQPDAADKASVLEPGRPASAGNALKGRVPPGDSPPGNGSGPRHINDSPFGTLPGSAEPPLTAVRPEGSEPPGFPTSGPRRRPGCSRKNRTRSHCRLGQAGSGGGGTGDSEGSGALPSLTCSLTPLGLALVLWTVLGPC

SEQ ID NO: 370 - protein, 317 aa, Homo sapiens
MAKNPPENCEDCHILNAEAFKSKKICKSLKICGLVFGILALTLIVLFWGSKHFWPEVPKKAYDMEHTFYSNGEKKKIYMEIDPVTRTEIFRSGNGTDETLEVHDFKNGYTGIYFVGLQKCFIKTQIKVIPEFSEPEEEIDENEEITTTFFEQSVIWVPAEKPIENRDFLKNSKILEICDNVTMYWINPTLISVSELQDFEEEGEDLHFPANEKKGIEQNEQWVVPQVKVEKTRHARQASEEELPINDYTENGIEFDPMLDERGYCCIYCRRGNRYCRRVCEPLLGYYPYPYCYQGGRVICRVIMPCNWWVARMLGRV

SEQ ID NO: 371 - protein, 164 aa, Homo sapiens
MNFLLSWVHWSLALLLYLHHAKWSQAAPMAEGGGQNHHEVVKFMDVYQRSYCHPIETLVDIFQEYPDEIEYIFKPSCVPLMRCGGCCNDEGLECVPTEESNITMQIMRIKPHQGQHIGEMSFLQHNKCECRPKKDRARQEKYVGARCCLMPWSLPGPQCDKPRR

SEQ ID NO: 372 - protein, 188 aa, Homo sapiens
MNFLLSWVHWSLALLLYLHHAKWSQAAPMAEGGGQNHHEVVKFMDVYQRSYCHPIETLVDIFQEYPDEIEYIFKPSCVPLMRCGGCCNDEGLECVPTEESNITMQIMRIKPHQGQHIGEMSFLQHNKCECRPKKDRARQEKKSVRGKGKGQKRKRKKSRYKSWSVYVGARCCLMPWSLPGPQCDKPRR

SEQ ID NO: 373 - protein, 208 aa, Homo sapiens
MNFLLSWVHWSLALLLYLHHAKWSQAAPMAEGGGQNHHEVVKFMDVYQRSYCHPIETLVDIFQEYPDEIEYIFKPSCVPLMRCGGCCNDEGLECVPTEESNITMQIMRIKPHQGQHIGEMSFLQHNKCECRPKKDRARQEKYVGARCCLMPWSLPGPHPCGPCSERRKHLFVQDPQTCKCSCKNTDSRCKARQLELNERTCRCDKPRR

SEQ ID NO: 374 - protein, 354 aa, Homo sapiens
MYREWVVVNVFMMLYVQLVQGSSNEHGPVKRSSQSTLERSEQQIRAASSLEELLRITHSEDWKLWRCRLRLKSFTSMDSRSASHRSTRFAATFYDIETLKVIDEEWQRTQCSPRETCVEVASELGKSTNTFFKPPCVNVFRCGGCCNEESLICMNTSTSYISKQLFEISVPLTSVPELVPVKVANHTGCKCLPTAPRHPYSIIRRSIQIPEEDRCSHSKKLCPIDMLWDSNKCKCVLQEENPLAGTEDHSHLQEPALCGPHMMFDEDRCECVCKTPCPKDLIQHPKNCSCFECKESLETCCQKHKLFHPDTCSCEDRCPFHTRPCASGKTACAKHCRFPKEKRAAQGPHSRKNP

SEQ ID NO: 375 - protein, 160 aa, Homo sapiens; identical to SEQ ID NO: 234

SEQ ID NO: 376 - protein, 182 aa, Homo sapiens; identical to SEQ ID NO: 235

SEQ ID NO: 377 - protein, 258 aa, Homo sapiens; identical to SEQ ID NO: 236

SEQ ID NO: 378 - protein, 355 aa, Homo sapiens
MDYTLDLSVTTVTDYYYPDIFSSPCDAELIQTNGKLLLAVFYCLLFVFSLLGNSLVILVLEVCKKLRSITDVYLLNLALSDLLFVFSFPFQTYYLLDQWVFGTVMCKVVSGFYYIGFYSSMFFITLMSVDRYLAVVHAVYALKVRTIRMGTTLCLAVWLTAIMATIPLLVFYQVASEDGVLQCYSFYNQQTLKWKIFTNFKMNILGLLIPFTIFMFCYIKILHQLKRCQNHNKTKAIRLVLIVVIASLLFWVPFNVVLFLTSLHSMHILDGCSISQQLTYATHVTEIISFTHCCVNPVIYAFVGEKFKKHLSEIFQKSCSQIFNYLGRQMPRESCEKSSSCQQHSSRSSNVDYIL

SEQ ID NO: 379 - protein, 355 aa, Homo sapiens
METPNTTEDYDTTTEFDYGDATPCQKVNERAFGAQLLPPLYSLVFVIGLVGNILVVLVLVQYKRLKNMTSIYLLNLAISDLLFLFTLPFWIDYKLKDDWVFGDAMCKILSGFYYTGLYSEIFFIILLTIDRYLAIVHAVFALRARTVTFGVITSIIIWALAILASMPGLYFSKTQWEFTHHTCSLHFPHESLREWKLFQALKLNLFGLVLPLLVMIICYTGIIKILLRRPNEKKSKAVRLIFVIMIIFFLFWTPYNLTILISVFQDFLFTHECEQSRHLDLAVQVTEVIAYTHCCVNPVIYAFVGERFRKYLRQLFHRRVAVHLVKWLPFLSVDRLERVSSTSPSTGEHELSAGF

SEQ ID NO: 380 - protein, 92 aa, Homo sapiens; identical to SEQ ID NO: 364

SEQ ID NO: 381 - protein, 93 aa, Homo sapiens
MQVSTAALAVLLCTMALCNQVLSAPLAADTPTACCFSYTSRQIPQNFIADYFETSSQCSKPSVIFLTKRGRQVCADPSEEWVQKYVSDLELSA

SEQ ID NO: 382 - protein, 211 aa, Homo sapiens [sequence omitted]

SEQ ID NO: 383 - protein, 196 aa, Homo sapiens; identical to SEQ ID NO: 123

SEQ ID NO: 384 - protein, 271 aa, Homo sapiens
MLLTSSLHHPRHQMSPGSWKKLIILLSCVFGGGGTSLQNKNPHQPMTLTWQGDPIPEELYKMLSGHSIRSFNDLQRLLQGDSGKEDGAELDLNMTRSHSGGELESLARGKRSLGSLSVAEPAMIAECKTRTEVFEISRRLIDRTNANFLVWPPCVEVQRCSGCCNNRNVQCRPTQVQLRPVQVRKIEIVRKKPIFKKATVTLEDHLACKCEIVAAARAVTRSPGTSQEQRAKTTQSRVTIRTVRVRRPPKGKHRKCKHTHDKTALKETLGA

SEQ ID NO: 385 - protein, 11 aa, Homo sapiens
RPKPQQFFGLM

SEQ ID NO: 386 - protein, 153 aa, Homo sapiens
APVRSLNCTLRDSQQKSLVMSGPYELKALHLQGQDMEQQVVFSMSFVQGEESNDKIPVALGLKEKNLYLSCVLKDDKPTLQLESVDPKNYPKKKMEKRFVFNKIEINNKLEFESAQFPNWYISTSQAENMPVFLGGTKGGQDITDFTMQFVSS

SEQ ID NO: 387 - protein, 144 aa, Homo sapiens; identical to SEQ ID NO: 279

SEQ ID NO: 388 - protein, 144 aa, Homo sapiens
MLLAMVLTSALLLCSVAGQGCPTLAGILDINFLINKMQEDPASKCHCSANVTSCLCLGIPSDNCTRPCFSERLSQMTNTTMQTRYPLIFSRVKKSVEVLKNNKCPYFSCEQPCNQTMAGNALTFLKSLLEIFQKEKMRGMRGKI

SEQ ID NO: 389 - protein, 126 aa, Homo sapiens
QGCPTLAGILDINFLINKMQEDPASKCHCSANVTSCLCLGIPSDNCTRPCFSERLSQMTNTTMQTRYPLIFSRVKKSVEVLKNNKCPYFSCEQPCNQTTAGNALTFLKSLLEIFQKEKMRGMRGKI

SEQ ID NO: 390 - protein, 126 aa, Homo sapiens
QGCPTLAGILDINFLINKMQEDPASKCHCSANVTSCLCLGIPSDNCTRPCFSERLSQMTNTTMQTRYPLIFSRVKKSVEVLKNNKCPYFSCEQPCNQTMAGNALTFLKSLLEIFQKEKMRGMRGKI

SEQ ID NO: 391 - protein, 261 aa, Homo sapiens
MLQAEAVQSPCGRKEHAECKTERRPEAGTHKREETGGNLRRESWGMVGRVRPEPGRPLRAMGKGPWTPSLGPDRDLALPPLTCGFPPQLFLLTISIFLGLGQPRSPKSKRKGQGRPGPLAPGPHQVPLDLVSRMKPYARMEEYERNIEEMVAQLRNSSELAQRKCEVNLQLWMSNKRSLSPWGYSINHDPSRIPVDLPEARCLCLGCVNPFTMQEDRSMVSVPVFSQVPVRRRLCPPPPRTGPCRQRAVMETIAVGCTCIF

SEQ ID NO: 392 - protein, 180 aa, Homo sapiens
MDWPHNLLFLLTISIFLGLGQPRSPKSKRKGQGRPGPLAPGPHQVPLDLVSRMKPYARMEEYERNIEEMVAQLRNSSELAQRKCEVNLQLWMSNKRSLSPWGYSINHDPSRIPVDLPEARCLCLGCVNPFTMQEDRSMVSVPVFSQVPVRRRLCPPPPRTGPCRQRAVMETIAVGCTCIF

SEQ ID NO: 393 - protein, 662 aa, Homo sapiens; identical to SEQ ID NO: 302

SEQ ID NO: 394 - protein, 862 aa, Homo sapiens; identical to SEQ ID NO: 301

SEQ ID NO: 395 - protein, 396 aa, Homo sapiens
MEFLKTCVLRRNACTAVCFWRSKVVQKPSVRRISTTSPRSTVMPAWVIDKYGKNEVLRFTQNMMMPIIHYPNEVIVKVHAASVNPIDVNMRSGYGATALNMKRDPLHVKIKGEEFPLTLGRDVSGVVMECGLDVKYFKPGDEVWAAVPPWKQGTLSEFVVVSGNEVSHKPKSLTHTQAASLPYVALTAWSAINKVGGLNDKNCTGKRVLILGASGGVGTFAIQVMKAWDAHVTAVCSQDASELVRKLGADDVIDYKSGSVEEQLKSLKPFDFILDNVGGSTETWAPDFLKKWSGATYVTLVTPFLLNMDRLGIADGMLQTGVTVGSKALKHFWKGVHYRWAFFMASGPCLDDIAELVDAGKIRPVIEQTFPFSKVPEAFLKVERGHARGKTVINVV

SEQ ID NO: 396 - protein, 570 aa, Homo sapiens
MTLLWCVVSLYFYGILQSDASERCDDWGLDTMRQIQVFEDEPARIKCPLFEHFLKFNYSTAHSAGLTLIWYWTRQDRDLEEPINFRLPENRISKEKDVLWFRPTLLNDTGNYTCMLRNTTYCSKVAFPLEVVQKDSCFNSPMKLPVHKLYIEYGIQRITCPNVDGYFPSSVKPTITWYMGCYKIQNFNNVIPEGMNLSFLIALISNNGNYTCVVTYPENGRTFHLTRTLTVKVVGSPKNAVPPVIHSPNDHVVYEKEPGEELLIPCTVYFSFLMDSRNEVWWTIDGKKPDDITIDVTINESISHSRTEDETRTQILSIKKVTSEDLKRSYVCHARSAKGEVAKAAKVTQKVPAPRYTVELACGFGATVLLVVILIVVYHVYWLEMVLFYRAHFGTDETILDGKEYDIYVSYARNAEEEEFVLLTLRGVLENEFGYKLCIFDRDSLPGGIVTDETLSFIQKSRRLLVVLSPNYVLQGTQALLELKAGLENMGSRGNINVILVQYKAVKETKVKELKRAKTVLTVIKWKGEKSKYPQGRFWKQLQVAMPVKKSPRRSSSDEQGLSYSSLKNV

SEQ ID NO: 397 - protein, 357 aa, Homo sapiens
MTLLWCWSLYFYGILQSDASERCDDWGLDTHRQIQVFEDEPARIKCPLFEHFLKFNYSTAHSAGLTLIWYWTRQDRDLEEPINFRLPENRISKEKDVLWFRPTLLNDTGNYTCMLRNTTYCSKVAFPLEWQKDSCFNSPMKLPVHKLYIEYGIQRITCPNVDGYFPSSVKPTITNYMGCYKIQNFNNVIPEGMNLSFLIALISNNGNYTCVVTYPENGRTFHLTRTLTVKVVGSPKNAVPPVIHSPNDHVVYEKEPGEELLIPCTVYFSFLMDSRNEVWWTIDGKKPDDITIDVTINESISHSRTEDETRTQILSIKKVTSEDLKRSYVCHARSAKGEVAKAAKVTQKVPAPRYTVE

SEQ ID NO: 398 - protein, 562 aa, Homo sapiens [sequence omitted]

SEQ ID NO: 399 - protein, 561 aa, Homo sapiens
MGMPPLLFCWVSFVLPLFVAAGNCTDVYMHHEMISEGQPFPFNCTYPPVTNGAVNLTWHRTPSKSPISINRHVRIHQDQSWILFLPLALEDSGIYQCVIKDAHSCYRIAINLTVFRKHWCDSSNEESSINSSDEYQQWLPIGKSGSLTCHLYFPESCVLDSIKWYKGCEEIKVSKKFCPTGTKLLVNNIDVEDSGSYACSARLTHLGRIFTVRNYIAVNTKEVGSGGRIPNITYPKNNSIEVQLGSTLIVDCNITDTKENTNLRCWRVNNTLVDDYYNDFKRIQEGIETNLSLRNHILYTVNITFLEVKMEDYGHPFTCHAAVSAAYIILKRPAPDFRAYLIGGLMAFLLLAVSILYIYNTFKVDIVLWYRSTFHTAQAPDDEKLYDAYVLYPKYPRESQGHDVDTLVLKILPEVLEKQCGYKLFIFGRDEFPGQAVASVIDENIKLCRRLMVLVAPETSSFSFLKNLTEEQIAVYNALVQDGMKVILIELERVKDYSTMPESIQYIRQKHGAIQWDGDFTEQAQCAKTKFWKKVRYHMPPRRYPASPPVQLLGHTPRIPG

SEQ ID NO: 400 - protein, 380 aa, Homo sapiens; identical to SEQ ID NO: 299

SEQ ID NO: 401 - protein, 137 aa, Homo sapiens
MKVSVAALSCLMLVTALGSQARVTKDAETEFMMSKLPLENPVLLDMLWRRKIGPQMTLSHAAGFHATSADCCISYTPRSIPCSLLESYFETNSECSKPGVIFLTKKGRRFCANPSDKQVQVCMRMLKLDTRIKTRKN

SEQ ID NO: 402 - protein, 101 aa, Homo sapiens
MSSAAGFCASRPGLLFLGLLLLPLVVAFASAEAEEDGDLQCLCVKTTSQVRPRHITSLEVIKAGPHCPTAQLIATLKKGRKACLNPASPIVKKIIKKLLES

SEQ ID NO: 403 - protein, 73 aa, Homo sapiens
MSAKDLQCQCIKTYSKPFHPKFIKELRVIESGPHCANTEIIVKLSDGRELCLDPKENWVQRVVEKFLKRAENS

SEQ ID NO: 404 - protein, 73 aa, Homo sapiens
MSAKELQCQCIKTYSKPFHPKFIKELRVIESGPHCANTEIIVKLSDGRELCLDPKENWVQRVVEKFLKRAENS

SEQ ID NO: 405 - protein, 98 aa, Homo sapiens; identical to SEQ ID NO: 249

SEQ ID NO: 406 - protein, 120 aa, Homo sapiens
MKVSEAALSLLVLILIITSASRSQPKVPEWVNTPSTCCLKYYEKVLPRRLVVGYRKALNCHLPAIIFVTKRNREVCTNPNDDWVQEYIKDPNLPLLPTRNLSTVKIITAKNGQPQLLNSQ

SEQ ID NO: 407 - protein, 96 aa, Homo sapiens; identical to SEQ ID NO: 248

SEQ ID NO: 408 - protein, 93 aa, Homo sapiens; identical to SEQ ID NO: 343

SEQ ID NO: 409 - protein, 109 aa, Homo sapiens
MKFISTSLLLMLLVSSLSPVQGVLEVYYTSLRCRCVQESSVFIPRRFIDRIQILPRGNGCPRKEIIVWKKNKSIVCVDPQAEWIQRMMEVLRKRSSSTLPVPVFKRKIP

SEQ ID NO: 410 - protein, 93 aa, Homo sapiens
MGLSLASAVLLASLLSLHLGTATRGSDISKTCCFQYLGTATRGSDISKTCCFQYSCSQRAVIFTTKRGKKVCTHPRKKWVQKYISLLKTPKQL

SEQ ID NO: 411 - protein, 111 aa, Homo sapiens
MAPISLSWLLRLATFCHLTVLLAGQHHGVTKCNITCSKMTSKIPVALLIHYQQNQASCGKRAIILETRQHRLFCADPKEQWVKDAMQHLDRQAAALTPKWRHLPKKPDRRG

SEQ ID NO: 412 - protein, 113 aa, Homo sapiens; identical to SEQ ID NO: 342

SEQ ID NO: 413 - protein, 150 aa, Homo sapiens [sequence omitted]

SEQ ID NO: 414 - protein, 120 aa, Homo sapiens; identical to SEQ ID NO: 406

SEQ ID NO: 415 - protein, 95 aa, Homo sapiens
MSVKGMAIALAVILCATVVQGFPMFKRGRCLCIGPGVKAVKVADIEKASIMYPSNNCDKIEVIITLKEIRKRCLTPNRASKQARLIIKKAERKNF

SEQ ID NO: 416 - protein, 127 aa, Homo sapiens
MQQRGLAIVALAVCAALHASEAILPIASSCCTEVSHHISRRLLERVNMCRIQRADGDCDLAAVILHVKRRRICVSPHNHTVKQWMKVQAAKKNGKGNVCHRKKHHGKRNSNRAHQGKHETYGHKTPY

SEQ ID NO: 417 - protein, 112 aa, Homo sapiens
MKGPPTFCSLLLLSLLLSPDPTAAFLLPPSTACCTQLYRKPLSDKLLRKVIQVELQEADGDCHLQAFVLHLAQRSICIHPQNPSLSQWFEHQERKLHGTLPKLNFGMLRKMG

SEQ ID NO: 418 - protein, 42 aa, Homo sapiens
RFEGYRPNLAESCPCRQYRAYVLTHSGELYERPERSDRQICV

SEQ ID NO: 419 - protein, 134 aa, Homo sapiens; identical to SEQ ID NO: 246

SEQ ID NO: 420 - protein, 93 aa, Homo sapiens
MARLQTALLVVLVLLAVALQATEAGPYGANMEDSVCCRDYVRYRLPLRVVKHFYWTSDSCPRPGVVLLTFRDKEICADPRVPWVKMILNKLSQ

SEQ ID NO: 421 - protein, 109 aa, Homo sapiens; identical to SEQ ID NO: 409

SEQ ID NO: 422 - protein, 93 aa, Homo sapiens; identical to SEQ ID NO: 420

SEQ ID NO: 423 - protein, 127 aa, Homo sapiens
  MOD_RES (70)..(70): Any naturally occurring amino acid
  MOD_RES (91)..(91): Any naturally occurring amino acid
MQQRGLAIVALAVCAALHASEAILPIASSCCTEVSHHISRRLLERVNMCRIQRADGDCDLAAVILHVKRXRICVSPHNHTVKQWMKVQAAXKNGKGNVCHRKKHHGKRNSNRAHQGKHETYGHKTPY

SEQ ID NO: 424 - protein, 104 aa, Homo sapiens
  MOD_RES (47)..(47): Any naturally occurring amino acid
  MOD_RES (68)..(68): Any naturally occurring amino acid
LPIASSCCTEVSHHISRRLLERVNMCRIQRADGDCDLAAVILHVKRXRICVSPHNHTVKQWMKVQAAXKNGKGNVCHRKKHHGKRNSNRAHQGKHETYGHKTPY

SEQ ID NO: 425 - protein, 69 aa, Homo sapiens
MKPVSLSYRCPCRFFESHVARANVKHLKILNTPNCALQIVARLKNNNRQVCIDPKLKWIQEYLEKALNK

SEQ ID NO: 426 - protein, 73 aa, Homo sapiens
MKPVSLSYRCPCRFFESHVARANVKHLKILNTPNCALQIVARLKNNNRQVCIDPKLKWIQEYLEKALNKRFKM

SEQ ID NO: 427 - protein, 90 aa, Homo sapiens
MAAKDVKHHHHHHGSGSDDDDKKPVSLSYRCPCRFFESHVARANVKHLKILNTPNCALQIVARLKNNNRQVCIDPKLKWIQEYLEKALNK

SEQ ID NO: 428 - protein, 94 aa, Homo sapiens
MAAKDVKHHHHHHGSGSDDDDKKPVSLSYRCPCRFFESHVARANVKHLKILNTPNCALQIVARLKNNNRQVCIDPKLKWIQEYLEKALNKRFKM

SEQ ID NO: 429 - protein, 71 aa, Homo sapiens
SIPITCCFNVINRKIPIQRLESYTRITNIQCPKEAVIFKTKRGKEVCADPKERWVRDSMKHLDQIFQNLKP

SEQ ID NO: 430 - protein, 66 aa, Homo sapiens
YSSDTTPCCFAYIARPLPRAHIKEYFYTSGKCSNPAVVFVTRKNRQVCANPEKKWVREYINSLEMS

SEQ ID NO: 431 - protein, 356 aa, Homo sapiens
MSIPLPLLQIYTSDNYTEEMGSGDYDSMKEPCFREENANFNKIFLPTIYSIIFLTGIVGNGLVILVMGYQKKLRSMTDKYRLHLSVADLLFVITLPFWAVDAVANWYFGNFLCKAVHVIYTVNLYSSVLILAFISLDRYLAIVHATNSQRPRKLLAEKVVYVGVWIPALLLTIPDFIFANVSEADDRYICDRFYPNDLWVVVFQFQHIMVGLILPGIVILSCYCIIISKLSHSKGHQKRKALKTTVILILAFFACWLPYYIGISIDSFILLEIIKQGCEFENTVHKWISITEALAFFHCCLNPILYAFLGAKFKTSAQHALTSVSRGSSLKILSKGKRGGHSSVSTESESSSFHSS

SEQ ID NO: 432 - protein, 94 aa, Homo sapiens; identical to SEQ ID NO: 349

SEQ ID NO: 433 - protein, 93 aa, Homo sapiens; identical to SEQ ID NO: 381

SEQ ID NO: 434 - protein, 92 aa, Homo sapiens; identical to SEQ ID NO: 364

SEQ ID NO: 435 - protein, 109 aa, Homo sapiens
MKISVAAIPFFLLITIALGTKTESSSQTGGKPKVVKIQLKLVGGPYHPSECCFTYTTYKIPRQRIMDYYETNSQCSKPGIVFITKRGHSVCTNPSDKWVQDYIKDMKEN

SEQ ID NO: 436 - protein, 134 aa, Homo sapiens; identical to SEQ ID NO: 246

SEQ ID NO: 437 - protein, 145 aa, Homo sapiens
MAQSLALSLLILVLAFGIPRTQGSDGGAQDCCLKYSQRKIPAKVVRSYRKQEPSLGCSIPAILFLPRKRSQAELCADPKELWVQQLMQHLDKTPSPQKPAQGCRKDRGASKTGKKGKGSKGCKSQPLTPLFCPHRTERSQTPKGP

SEQ ID NO: 438 - protein, 93 aa, Homo sapiens; identical to SEQ ID NO: 381

SEQ ID NO: 439 - protein, 89 aa, Homo sapiens
MKGLAAALLVLVCTMALCSCAQVGTNKELCCLVYTSWQIPQKFIVDYSETSPQCPKPGVILLTKRGRQICADPNKKWVQKYISDLKLNA

SEQ ID NO: 440 - protein, 69 aa, Homo sapiens
AQVGTNKELCCLVYTSWQIPQKFIVDYSETSPQCPKPGVILLTKRGRQICADPNKKWVQKYISDLKLNA

SEQ ID NO: 441 - protein, 264 aa, Homo sapiens
MKKTAIAIAVALAGFATVANADEPPQSPWDRVKDLATVYVDVLKDSGRDYVSQFEGSALGKQLNLKLLDNWDSVTSTFSKLREQLGPVTQEFWDNLEKETEGLRQEMSKDLEEVKAKVQPYLDDFQKKWQEEMELYRQKVEPLRAELQEGARQKLHELQEKLSPLGEEMRDRARAHVDALRTHLAPYSDELRQCLAARLEALKENGGARLAEYHAKATEHLSTLSEKAKPALEDLRQGLLPVLESFKVSFLSALEEYTKKLNTQ

SEQ ID NO: 442 - protein, 687 aa, Homo sapiens
MVSYWDTGVLLCALLSCLLLTGSSSGSKLKDPELSLKGTQHIMQAGQTLHLQCRGEAAHKWSLPEMVSKESERLSITKSACGRNGKQFCSTLTLNTAQANHTGFYSCKYLAVPTSKKKETESAIYIFISDTGRPFVEMYSEIPEIIHMTEGRELVIPCRVTSPNITVTLKKFPLDTLIPDGKRIIWDSRKGFIISNATYKEIGLLTCEATVNGHLYKTNYLTHRQTNTIIDVQISTPRPVKLLRGHTLVLNCTATTPLNTRVQMTWSYPDEKNKRASVRRRIDQSNSHANIFYSVLTIDKMQNKDKGLYTCRVRSGPSFKSVNTSVHIYDKAFITVKHRKQQVLETVAGKRSYRLSMKVKAFPSPEVVWLKDGLPATEKSARYLTRGYSLIIKDVTEEDAGNYTILLSIKQSNVFKNLTATLIVNVKPQIYEKAVSSFPDPALYPLGSRQILTCTAYGIPQPTIKWFWHPCNHNHSEARCDFCSNNEESFILDADSNMGNRIESITQRMAIIEGKNKMASTLVVADSRISGIYICIASNKVGTVGRNISFYITDVPNGFHVNLEKMPTEGEDLKLSCTVNKFLYRDVTWILLRTVNNRTMHYSISKQKMAITKEHSITLNLTIMNVSLQDSGTYACRARNVYTGEEILQKKEITIRGEHCNKKAVFSRISKFKSTRNDCTTQSNVKH

SEQ ID NO: 443 - protein, 668 aa, Homo sapiens
SEQNMQSKVLLAVALWLCVETRAASVGLPSVSLDLPRLSIQKDILTIKANTTLQITCRGQRDLDWLWPNNQSGSEQRVEVTECSDGLFCKTLTIPKVIGNDTGAYKCFYRETDLASVIYVYVQDYRSPFIASVSDQHGVVYITENKNKTVVIPCLGSISNLNVSLCARYPEKRFVPDGNRISWDSKKGFTIPSYMISYAGMVFCEAKINDESYQSIMYIVVVVGYRIYDVVLSPSHGIELSVGEKLVLNCTARTELNVGIDFNWEYPSSKHQHKKLVNRDLKTQSGSEMKKFLSTLTIDGVTRSDQGLYTCAASSGLMTKKNSTFVRVHEKPFVAFGSGMESLVEATVGERVRIPAKYLGYPPPEIKWYKNGIPLESNHTIKAGHVLTIMEVSERDTGNYTVILTNPISKEKQSHVVSLVVYVPPQIGEKSLISPVDSYQYGTTQTLTCTVYAIPPPHHIHWYWQLEEECANEPSQAVSVTNPYPCEEWRSVEDFQGGNKIAVNKNQFALIEGKNKTVSTLVIQAANVSALYKCEAVNKVGRGERVISFHVTRGPEITLQPDMQPTEQESVSLWCTADRSTFENLTWYKLGPQPLPIHVGELPTPVCKNLDTLWKLNATMFSNSTNDILIMELKNASLQDQGDYVCLAQDRKTKKRHCVVRQLTVLER

SEQ ID NO: 444 - protein, 780 aa, Homo sapiens
MVSYWDTGVLLCALLSCLLLTGSSSGSKLKDPELSLKGTQHIMQAGQTLHLQCRGEAAHKWSLPEMVSKESERLSITKSACGRNGKQFCSTLTLNTAQANHTGFYSCKYLAVPTSKKKETESAIYIFISDTGRPFVEMYSEIPEIIHMTEGRELVIPCRVTSPNITVTLKKFPLDTLIPDGKRIIWDSRKGFIISNATYKEIGLLTCEATVNGHLYKTNYLTHRQTNTIIDVQISTPRPVKLLRGHTLVLNCTATTPLNTRVQMTWSYPDEKNKRASVRRRIDQSNSHANIFYSVLTIDKMQNKDKGLYTCRVRSGPSFKSVNTSVHIYDKAFITVKHRKQQVLETVAGKRSYRLSMKVKAFPSPEVVWLKDGLPATEKSARYLTRGYSLIIKDVTEEDAGNYTILLSIKQSNVFKNLTATLIVNVKPQIYEKAVSSFPDPALYPLGSRQILTCTAYGIPQPTIKWFWHPCNHNHSEARCDFCSNNEESFILDADSNMGNRIESITQRMAIIEGKNKMASTLVVADSRISGIYICIASNKVGTVGRNISFYITDVPNGFHVNLEKMPTEGEDLKLSCTVNKFLYRDVTWILLRTVNNRTMHYSISKQKMAITKEHSITLNLTIMNVSLQDSGTYACRARNVYTGEEILQKKEITIRDQEAPYLLRNLSDHTVAISSSTTLDCHANGVPEPQITWFKNNHKIQQEPGIILGPGSSTLFIERVTEEDEGVYHCKATNQKGSVESSAYLTVQGTSDKSNLELITLTCTCVAATLFWLLLTLLI

SEQ ID NO: 445 - protein, 788 aa, Homo sapiens
MQSKVLLAVALWLCVETRAASVGLPSVSLDLPRLSIQKDILTIKANTTLQITCRGQRDLDWLWPNNQSGSEQRVEVTECSDGLFCKTLTIPKVIGNDTGAYKCFYRETDLASVIYVYVQDYRSPFIASVSDQHGVVYITENKNKTVVIPCLGSISNLNVSLCARYPEKRFVPDGNRISWDSKKGFTIPSYMISYAGMVFCEAKINDESYQSIMYIVVVVGYRIYDVVLSPSHGIELSVGEKLVLNCTARTELNVGIDFNWEYPSSKHQHKKLVNRDLKTQSGSEMKKFLSTLTIDGVTRSDQGLYTCAASSGLMTKKNSTFVRVHEKPFVAFGSGMESLVEATVGERVRIPAKYLGYPPPEIKWYKNGIPLESNHTIKAGHVLTIMEVSERDTGNYTVILTNPISKEKQSHVVSLVVYVPPQIGEKSLISPVDSYQYGTTQTLTCTVYAIPPPHHIHWYWQLEEECANEPSQAVSVTNPYPCEEWRSVEDFQGGNKIAVNKNQFALIEGKNKTVSTLVIQAANVSALYKCEAVNKVGRGERVISFHVTRGPEITLQPDMQPTEQESVSLWCTADRSTFENLTWYKLGPQPLPIHVGELPTPVCKNLDTLWKLNATMFSNSTNDILIMELKNASLQDQGDYVCLAQDRKTKKRHCVVRQLTVLERVAPTITGNLENQTTSIGESIEVSCTASGNPPPQIMWFKDNETLVEDSGIVLKDGNRNLTIRRVRKEDEGLYCQACSVLGCAKVEAFFIIEGAQEKTNLEIIILVGTTVIAMFFWLLLVIILGTV

SEQ ID NO: 446 - protein, 374 aa, Homo sapiens; identical to SEQ ID NO: 362

SEQ ID NO: 447 - protein, 360 aa, Homo sapiens
MLSTSRSRFIRNTNESGEEVTTFFDYDYGAPCHKFDVKQIGAQLLPPLYSLVFIFGFVGNMLVVLILINCKKLKCLTDIYLLNLAISDLLFLITLPLWAHSAANEWVFGNAMCKLFTGLYHIGYFGGIFFIILLTIDRYLAIVHAVFALKARTVTFGVVTSVITWLVAVFASVPGIIFTKCQKEDSVYVCGPYFPRGWNNFHTIMRNILGLVLPLLIMVICYSGILKTLLRCRNEKKRHRAVRVIFTIMIVYFLFWTPYNIVILLNTFQEFFGLSNCESTSQLDQATQVTETLGMTHCCINPIIYAFVGEKFRRYLSVFFRKHITKRFCKQCPVFYRETVDGVTSTNTPSTGEQEVSAGL

SEQ ID NO: 448 - protein, 352 aa, Homo sapiens [sequence omitted]

SEQ ID NO: 449 - protein, 152 aa, Homo sapiens; identical to SEQ ID NO: 280

SEQ ID NO: 450 - protein, 195 aa, Homo sapiens
DSQGVLSSFPAPQAVQDNPAMPTSSGSEGNVKLCSLEEAQRIWKQKSAEIYPIMDKSSRTRLALIICNEEFDSIPRRTGAEVDITGMTMLLQNLGYSVDVKKNLTASDMTTELEAFAHRPEHKTSDSTFLVFMSHGIREGICGKKHSEQVPDILQLNAIFNMLNTKNCPSLKDKPKVIIIQACRGDSPGVVWFKD

SEQ ID NO: 451 - protein, 178 aa, Homo sapiens
  MOD_RES (1)..(1): Asp or Asn
XPAMPTSSGSEGNVKLCSLEEAQRIWKQKSAEIYPIMDKSSRTRLALIICNEEFDSIPRRTGAEVDITGMTMLLQNLGYSVDVKKNLTASDMTTELEAFAHRPEHKTSDSTFLVFMSHGIREGICGKKHSEQVPDILQLNAIFNMLNTKNCPSLKDKPKVIIIQACRGDSPGVVWFKD

SEQ ID NO: 452 - protein, 86 aa, Homo sapiens
AIKKAHIEKDFIAFCSSTPDNVSWRHPTMGSVFIGRLIEHMQEYACSCDVEEIFRKVRFSFEQPGRAQMPTTERVTTRCFYLFPGH

SEQ ID NO: 453 - protein, 267 aa, Homo sapiens; identical to SEQ ID NO: 313

SEQ ID NO: 454 - protein, 208 aa, Homo sapiens
MTHLSLLGPLPCVRTSQQLPETQQVTTPGKKPVSVGRREVRVPGTALVPSLLSVSVSPAAPQYQGSPFSDPGFSAPELQLSSLPPATAFFKTWHALDDGERLSPRGPLTQHLQLVEDDQSDLNPGSPILPAQLGAARLRAQGPLGNMAAIMTALGLPIPPEEDTPGLAAFGASAFERKCRGYVVTREYGHWTDRAVRDLALLKAKYSA

SEQ ID NO: 455 - protein, 208 aa, Homo sapiens [sequence omitted]

SEQ ID NO: 456 - protein, 109 aa, Homo sapiens
MLKLTPLPSKMKVSAALLCLLLMAATFSPQGLAQPDSVSIPITCCFNVINRKIPIQRLESYTRITNIQCPKEAVIFKTKRGKEVCADPKERWVRDSMKHLDQIFQNLKP

SEQ ID NO: 457 - protein, 122 aa, Homo sapiens
MKPFHTALSFLILTTALGIWAQITHATETKEVQSSLKAQQGLEIEMFHMGFQDSSDCCLSYNSRIQCSRFIGYFPTSGGCTRPGIIFISKRGFQVCANPSDRRVQRCIERLEQNSQPRTYKQ

SEQ ID NO: 458 - protein, 131 aa, Homo sapiens
MARSLVCLGVIILLSAFSGPGVRGGPMPKLADRKLCADQECSHPISMAVALQDYMAPDCRFLTIHRGQVVYVFSKLKGRGRLFWGGSVQGDYYGDLAARLGYFPSSIVREDQTLKPGKVDVKTDKWDFYCQ

SEQ ID NO: 459 - protein, 120 aa, Homo sapiens
MKVSVAALSCLMLVTALGSQARVTKDAETEFMMSKLPLENPVLLDRFHATSADCCISYTPRSIPCSLLESYFETNSECSKPGVIFLTKKGRRFCANPSDKQVQVCVRMLKLDTRIKTRKN

SEQ ID NO: 460 - protein, 114 aa, Homo sapiens
MRLLILALLGICSLTAYIVEGVGSEVSHRRTCVSLTTQRLPVSRIKTYTITEGSLRAVIFITKRGLKVCADPQATWVRDVVRSMDRKSNTRNNMIQTKPTGTQQSTNTAVTLTG

SEQ ID NO: 461 - protein, 1255 aa, Homo sapiens
MTPGTQSPFFLLLLLTVLTVVTGSGHASSTPGGEKETSATQRSSVPSSTEKNAVSMTSSVLSSHSPGSGSSTTQGQDVTLAPATEPASGSAATWGQDVTSVPVTRPALGSTTPPAHDVTSAPDNKPAPGSTAPPAHGVTSAPDTRPAPGSTAPPAHGVTSAPDTRPAPGSTAPPAHGVTSAPDTRPAPGSTAPPAHGVTSAPDTRPAPGSTAPPAHGVTSAPDTRPAPGSTAPPAHGVTSAPDTRPAPGSTAPPAHGVTSAPDTRPAPGSTAPPAHGVTSAPDTRPAPGSTAPPAHGVTSAPDTRPAPGSTAPPAHGVTSAPDTRPAPGSTAPPAHGVTSAPDTRPAPGSTAPPAHGVTSAPDTRPAPGSTAPPAHGVTSAPDTRPAPGSTAPPAHGVTSAPDTRPAPGSTAPPAHGVTSAPDTRPAPGSTAPPAHGVTSAPDTRPAPGSTAPPAHGVTSAPDTRPAPGSTAPPAHGVTSAPDTRPAPGSTAPPAHGVTSAPDTRPAPGSTAPPAHGVTSAPDTRPAPGSTAPPAHGVTSAPDTRPAPGSTAPPAHGVTSAPDTRPAPGSTAPPAHGVTSAPDTRPAPGSTAPPAHGVTSAPDTRPAPGSTAPPAHGVTSAPDTRPAPGSTAPPAHGVTSAPDTRPAPGSTAPPAHGVTSAPDTRPAPGSTAPPAHGVTSAPDTRPAPGSTAPPAHGVTSAPDTRPAPGSTAPPAHGVTSAPDTRPAPGSTAPPAHGVTSAPDTRPAPGSTAPPAHGVTSAPDTRPAPGSTAPPAHGVTSAPDTRPAPGSTAPPAHGVTSAPDTRPAPGSTAPPAHGVTSAPDTRPAPGSTAPPAHGVTSAPDTRPAPGSTAPPAHGVTSAPDTRPAPGSTAPPAHGVTSAPDTRPAPGSTAPPAHGVTSAPDTRPAPGSTAPPAHGVTSAPDTRPAPGSTAPPAHGVTSAPDNRPALGSTAPPVHNVTSASGSASGSASTLVHNGTSARATTTPASKSTPFSIPSHHSDTPTTLASHSTKTDASSTHHSSVPPLTSSNHSTSPQLSTGVSFFFLSFHISNLQFNSSLEDPSTDYYQELQRDISEMFLQIYKQGGFLGLSNIKFRPGSVVVQLTLAFREGTINVHDVETQFNQYKTEAASRYNLTISDVSVSDVPFPFSAQSGAGVPGWGIALLVLVCVLVALAIVYLIALAVCQCRRKNYGQLDIFPARDTYHPMSEYPTYHTHGRYVPPSSTDRSPYEKVSAGNGGSSLSYTNPAVAATSANL

SEQ ID NO: 462 - protein, 478 aa, Human immunodeficiency virus
KLWVTVYYGVPVWKEATTTLFCASDARAYDTEVHNVWATHACVPTDPNPQEVVLGNVTENFNMWKNNMVEQMQEDIISLWDQSLKPCVKLTPLCVTLNCTDLGKATNTNSSNWKEEIKGEIKNCSFNITTSIRDKIQKENALFRNLDVVPIDNASTTTNYTNYRLIHCNRSVITQACPKVSFEPIPIHYCTPAGFAILKCNNKTFNGKGPCTNVSTVQCTHGIRPIVSTQLLLNGSLAEEEVVIRSDNFTNNAKTIIVQLNESVAINCTRPNNNTRKSIYIGPGRAFHTTGRIIGDIRKAHCNISRAQWNNTLEQIVKKLREQFGNNKTIVFNQSSGGDPEIVMHSFNCRGEFFYCNTTQLFNNTWRLNHTEGTKGNDTIILPCRIKQIINMWQEVGKAMYAPPIGGQISCSSNITGLLLTRDGGTNVTNDTEVFRPGGGDMRDNWRSELYKYKVIKIEPLGIAPTKAKRRVVQREKR

SEQ ID NO: 463 - protein, 94 aa, Homo sapiens; identical to SEQ ID NO: 363

SEQ ID NO: 464 - protein, 477 aa, Homo sapiens
LEHDNPEDDKVYFFFRENAIDGEHSGKATHARIGQICKNDFGGHRSLVNKWTTFLKARLICSVPGPNGIDTHFDELQDVFLMNFKDPKNPVVYGVFTTSSNIFKGSAVCMYSMSDVRRVFLGPYAHRDGPNYQWVPYQGRVPYPRPGTCPSKTFGGFDSTKDLPDDVITFARSHPAMYNPVFPMNNRPIVIKTDVNYQFTQIVVDRVDAEDGQYDVMFIGTDVGTVLKVVSIPKETWYDLEEVLLEEMTVFREPTAISAMELSTKQQQLYIGSTAGVAQLPLHRCDIYGKACAECCLARDPYCAWDGSACSRYFPTAKRRTRRQDIRNGDPLTHCSDLHHDNHHGHSPEERIIYGVENSSTFLECSPKSQRALVYWQFQRRNEERKEEIRVDDHIIRTDQGLLLRSLQQKDSGNYLCHAVEHGFIQTLLKVTLEVIDNEHLEELLHKDDDGHGSKTKEMSNSMTPSQKVWYRDFMQP

SEQ ID NO: 465 - protein, 241 aa, Homo sapiens; identical to SEQ ID NO: 254

SEQ ID NO: 466 - protein, 267 aa, Homo sapiens
MKAAVLTLAVLFLTGSQARHFWQQDEPPQSPWDRVKDLATVYVDVLKDSGRDYVSQFEGSALGKQLNLKLLDNWDSVTSTFSKLREQLGPVTQEFWDNLEKETEGLRQEMSKDLEEVKAKVQPYLDDFQKKWQEEMELYRQKVEPLRAELQEGARQKLHELQEKLSPLGEEMRDRARAHVDALRTHLAPYSDELRQRLAARLEALKENGGARLAEYHAKATEHLSTLSEKAKPALEDLRQGLLPVLESFKVSFLSALEEYTKKLNTQ

SEQ ID NO: 467 - DNA, 20 bp, Artificial Sequence
  Synthetic oligonucleotide
tgagcagaagtggctcagtg

SEQ ID NO: 468 - DNA, 20 bp, Artificial Sequence
  Synthetic oligonucleotide
tggctgtacagctacacccc

SEQ ID NO: 469 - DNA, 20 bp, Artificial Sequence
  Synthetic oligonucleotide
ttccactcctgcagggcccc

SEQ ID NO: 470 - DNA, 20 bp, Artificial Sequence
  Synthetic oligonucleotide
tcgcccttcagcccgcgttc

SEQ ID NO: 471 - protein, 7 aa, Homo sapiens
PKKKRKV

SEQ ID NO: 472 - protein, 16 aa, Homo sapiens
LGRVIPRKIASRASLM

SEQ ID NO: 473 - DNA, 20 bp, Artificial Sequence
  Synthetic oligonucleotide
tgagcagaagtggctcagtg

SEQ ID NO: 474 - DNA, 20 bp, Artificial Sequence
  Synthetic oligonucleotide
tcggccgccgccaagctcgt

SEQ ID NO: 475 - DNA, 20 bp, Artificial Sequence
  Synthetic oligonucleotide
tgcgcgcagcctggtaggag

SEQ ID NO: 476 - DNA, 24 bp, Artificial Sequence
  Synthetic oligonucleotide
taactcaagactgcctcccgcttt

SEQ ID NO: 477 - DNA, 24 bp, Artificial Sequence
  Synthetic oligonucleotide
agcccaaggtttcagaggtgatga

SEQ ID NO: 478 - DNA, 21 bp, Artificial Sequence
  Synthetic oligonucleotide
gcatctgccctgcgggagatc

SEQ ID NO: 479 - DNA, 26 bp, Artificial Sequence
  Synthetic oligonucleotide
ccacgttctcctttctctccccgttc

SEQ ID NO: 480 - skipped

SEQ ID NO: 481 - DNA, 21 bp, Artificial Sequence
  Synthetic oligonucleotide
gcatctgccctgcgggagatc

SEQ ID NO: 482 - DNA, 26 bp, Artificial Sequence
  Synthetic oligonucleotide
ccacgttctcctttctctccccgttc

SEQ ID NO: 483 - DNA, 32 bp, Artificial Sequence
  Synthetic oligonucleotide
aaaaaaaccggttcattttctcttccggccac

SEQ ID NO: 484 - DNA, 27 bp, Artificial Sequence
  Synthetic oligonucleotide
aaaaaagctagcatggcgggtctgacg

SEQ ID NO: 485 - DNA, 32 bp, Artificial Sequence; identical to SEQ ID NO: 483
  Synthetic oligonucleotide

SEQ ID NO: 486 - protein, 786 aa, Homo sapiens
MAGLTAAAPRPGVLLLLLSILHPSRPGGVPGAIPGGVPGGVFYPGAGLGALGGGALGPGGKPLKPVPGGLAGAGLGAGLGAFPAVTFPGALVPGGVADAAAAYKAAKAGAGLGGVPGVGGLGVSAGAVVPQPGAGVKPGKVPGVGLPGVYPGGVLPGARFPGVGVLPGVPTGAGVKPKAPGVGGAFAGIPGVGPFGGPQPGVPLGYPIKAPKLPGGYGLPYTTGKLPYGYGPGGVAGAAGKAGYPTGTGVGPQAAAAAAAKAAAKFGAGAAGVLPGVGGAGVPGVPGAIPGIGGIAGVGTPAAAAAAAAAAKAAKYGAAAGLVPGGPGFGPGVVGVPGAGVPGVGVPGAGIPVVPGAGIPGAAVPGVVSPEAAAKAAAKAAKYGARPGVGVGGIPTYGVGAGGFPGFGVGVGGIPGVAGVPGVGGVPGVGGVPGVGISPEAQAAAAAKAAKYGAAGAGVLGGLVPGPQAAVPGVPGTGGVPGVGTPAAAAAKAAAKAAQFGLVPGVGVAPGVGVAPGVGVAPGVGLAPGVGVAPGVGVAPGVGVAPGIGPGGVAAAAKSAAKVAAKAQLRAAAGLGAGIPGLGVGVGVPGLGVGAGVPGLGVGAGVPGFGAGADEGVRRSLSPELREGDPSSSQHLPSTPSSPRVPGALAAAKAAKYGAAVPGVLGGLGALGGVGIPGGVVGAGPAAAAAAAKAAAKAAQFGLVGAAGLGGLGVGGLGVPGVGGLGGIPPAAAAKAAKYGAAGLGGVLGGAGQFPLGGVAARPGFGLSPIFPGGACLGKACGRKRK

SEQ ID NO: 487 - protein, 1464 aa, Homo sapiens
MFSFVDLRLLLLLAATALLTHGQEEGQVEGQDEDIPPITCVQNGLRYHDRDVWKPEPCRICVCDNGKVLCDDVICDETKNCPGAEVPEGECCPVCPDGSESPTDQETTGVEGPKGDTGPRGPRGPAGPPGRDGIPGQPGLPGPPGPPGPPGPPGLGGNFAPQLSYGYDEKSTGGISVPGPMGPSGPRGLPGPPGAPGPQGFQGPPGEPGEPGASGPMGPRGPPGPPGKNGDDGEAGKPGRPGERGPPGPQGARGLPGTAGLPGMKGHRGFSGLDGAKGDAGPAGPKGEPGSPGENGAPGQMGPRGLPGERGRPGAPGPAGARGNDGATGAAGPPGPTGPAGPPGFPGAVGAKGEAGPQGPRGSEGPQGVRGEPGPPGPAGAAGPAGNPGADGQPGAKGANGAPGIAGAPGFPGARGPSGPQGPGGPPGPKGNSGEPGAPGSKGDTGAKGEPGPVGVQGPPGPAGEEGKRGARGEPGPTGLPGPPGERGGPGSRGFPGADGVAGPKGPAGERGSPGPAGPKGSPGEAGRPGEAGLPGAKGLTGSPGSPGPDGKTGPPGPAGQDGRPGPPGPPGARGQAGVMGFPGPKGAAGEPGKAGERGVPGPPGAVGPAGKDGEAGAQGPPGPAGPAGERGEQGPAGSPGFQGLPGPAGPPGEAGKPGEQGVPGDLGAPGPSGARGERGFPGERGVQGPPGPAGPRGANGAPGNDGAKGDAGAPGAPGSQGAPGLQGMPGERGAAGLPGPKGDRGDAGPKGADGSPGKDGVRGLTGPIGPPGPAGAPGDKGESGPSGPAGPTGARGAPGDRGEPGPPGPAGFAGPPGADGQPGAKGEPGDAGAKGDAGPPGPAGPAGPPGPIGNVGAPGAKGARGSAGPPGATGFPGAAGRVGPPGPSGNAGPPGPPGPAGKEGGKGPRGETGPAGRPGEVGPPGPPGPAGEKGSPGADGPAGAPGTPGPQGIAGQRGVVGLPGQRGERGFPGLPGPSGEPGKQGPSGASGERGPPGPMGPPGLAGPPGESGREGAPGAEGSPGRDGSPGAKGDRGETGPAGPPGAPGAPGAPGPVGPAGKSGDRGETGPAGPTGPVGPVGARGPAGPQGPRGDKGETGEQGDRGIKGHRGFSGLQGPPGPPGSPGEQGPSGASGPAGPRGPPGSAGAPGKDGLNGLPGPIGPPGPRGRTGDAGPVGPPGPPGPPGPPGPPSAGFDFSFLPQPPQEKAHDGGRYYRADDANVVRDRDLEVDTTLKSLSQQIENIRSPEGSRKNPARTCRDLKMCHSDWKSGEYWIDPNQGCNLDAIKVFCNMETGETCVYPTQPSVAQKNWYISKNPKDKRHVWFGESMTDGFQFEYGGQGSDPADVAIQLTFLRLMSTEASQNITYHCKNSVAYMDQQTGNLKKALLLQGSNEIEIRAEGNSRFTYSVTVDGCTSHTGAWGKTVIEYKTTKTSRLPIIDVAPLDVGAPDQEFGFDVGPVCFL

SEQ ID NO: 488 - protein, 1366 aa, Homo sapiens; identical to SEQ ID NO: 62

SEQ ID NO: 489 - protein, 1466 aa, Homo sapiens
MMSFVQKGSWLLLALLHPTIILAQQEAVEGGCSHLGQSYADRDVWKPEPCQICVCDSGSVLCDDIICDDQELDCPNPEIPFGECCAVCPQPPTAPTRPPNGQGPQGPKGDPGPPGIPGRNGDPGIPGQPGSPGSPGPPGICESCPTGPQNYSPQYDSYDVKSGVAVGGLAGYPGPAGPPGPPGPPGTSGHPGSPGSPGYQGPPGEPGQAGPSGPPGPPGAIGPSGPAGKDGESGRPGRPGERGLPGPPGIKGPAGIPGFPGMKGHRGFDGRNGEKGETGAPGLKGENGLPGENGAPGPMGPRGAPGERGRPGLPGAAGARGNDGARGSDGQPGPPGPPGTAGFPGSPGAKGEVGPAGSPGSNGAPGQRGEPGPQGHAGAQGPPGPPGINGSPGGKGEMGPAGIPGAPGLMGARGPPGPAGANGAPGLRGGAGEPGKNGAKGEPGPRGERGEAGIPGVPGAKGEDGKDGSPGEPGANGLPGAAGERGAPGFRGPAGPNGIPGEKGPAGERGAPGPAGPRGAAGEPGRDGVPGGPGMRGMPGSPGGPGSDGKPGPPGSQGESGRPGPPGPSGPRGQPGVMGFPGPKGNDGAPGKNGERGGPGGPGPQGPPGKNGETGPQGPPGPTGPGGDKGDTGPPGPQGLQGLPGTGGPPGENGKPGEPGPKGDAGAPGAPGGKGDAGAPGERGPPGLAGAPGLRGGAGPPGPEGGKGAAGPPGPPGAAGTPGLQGMPGERGGLGSPGPKGDKGEPGGPGADGVPGKDGPRGPTGPIGPPGPAGQPGDKGEGGAPGLPGIAGPRGSPGERGETGPPGPAGFPGAPGQNGEPGGKGERGAPGEKGEGGPPGVAGPPGGSGPAGPPGPQGVKGERGSPGGPGAAGFPGARGLPGPPGSNGNPGPPGPSGSPGKDGPPGPAGNTGAPGSPGVSGPKGDAGQPGEKGSPGAQGPPGAPGPLGIAGITGARGLAGPPGMPGPRGSPGPQGVKGESGKPGANGLSGERGPPGPQGLPGLAGTAGEPGRDGNPGSDGLPGRDGSPGGKGDRGENGSPGAPGAPGHPGPPGPVGPAGKSGDRGESGPAGPAGAPGPAGSRGAPGPQGPRGDKGETGERGAAGIKGHRGFPGNPGAPGSPGPAGQQGAIGSPGPAGPRGPVGPSGPPGKDGTSGHPGPIGPPGPRGNRGERGSEGSPGHPGQPGPPGPPGAPGPCCGGVGAAAIAGIGGEKAGGFAPYYGDEPMDFKINTDEIMTSLKSVNGQIESLISPDGSRKNPARNCRDLKFCHPELKSGEYWVDPNQGCKLDAIKVFCNMETGETCISANPLNVPRKHWWTDSSAEKKHVWFGESMDGGFQFSYGNPELPEDVLDVHLAFLRLLSSRASQNITYHCKNSIAYMDQASGNVKKALKLMGSNEGEFKAEGNSKFTYTVLEDGCTKHTGEWSKTVFEYRTRKAVRLPIVDIAPYDIGGPDQEFGVDVGPVCFL

SEQ ID NO: 490 - protein, 2944 aa, Homo sapiens; identical to SEQ ID NO: 78

SEQ ID NO: 491 - protein, 529 aa, Homo sapiens [sequence omitted]

SEQ ID NO: 492 - protein, 1669 aa, Homo sapiens; identical to SEQ ID NO: 66

SEQ ID NO: 493 - protein, 1712 aa, Homo sapiens; identical to SEQ ID NO: 67

SEQ ID NO: 494 - protein, 1670 aa, Homo sapiens; identical to SEQ ID NO: 68

SEQ ID NO: 495 - protein, 1690 aa, Homo sapiens; identical to SEQ ID NO: 69

SEQ ID NO: 496 - protein, 1685 aa, Homo sapiens; identical to SEQ ID NO: 70

SEQ ID NO: 497 - protein, 1691 aa, Homo sapiens; identical to SEQ ID NO: 71

SEQ ID NO: 498 - protein, 2944 aa, Homo sapiens; identical to SEQ ID NO: 78

SEQ ID NO: 499 - protein, 1838 aa, Homo sapiens; identical to SEQ ID NO: 72

SEQ ID NO: 500 - protein, 1499 aa, Homo sapiens; identical to SEQ ID NO: 73

SEQ ID NO: 501 - protein, 1745 aa, Homo sapiens; identical to SEQ ID NO: 74

SEQ ID NO: 502 - protein, 824 aa, Homo sapiens; identical to SEQ ID NO: 145

SEQ ID NO: 503 - protein, 423 aa, Homo sapiens; identical to SEQ ID NO: 151

SEQ ID NO: 504 - protein, 307 aa, Homo sapiens; identical to SEQ ID NO: 162

SEQ ID NO: 505 - protein, 1118 aa, Homo sapiens
MARSPGRAYALLLLLICFNVGSGLHLQVLSTRNENKLLPKHPHLVRQKRAWITAPVALREGEDLSKKNPIAKIHSDLAEERGLKITYKYTGKGITEPPFGIFVFNKDTGELNVTSILDREETPFFLLTGYALDARGNNVEKPLELRIKVLDINDNEPVFTQDVFVGSVEELSAAHTLVMKINATDADEPNTLNSKISYRIVSLEPAYPPVFYLNKDTGEIYTTSVTLDREEHSSYTLTVEARDGNGEVTDKPVKQAQVQIRILDVNDNIPVVENKVLEGMVEENQVNVEVTRIKVFDADEIGSDNWLANFTFASGNEGGYFHIETDAQTNEGIVTLIKEVDYEEMKNLDFSVIVANKAAFHKSIRSKYKPTPIPIKVKVKNVKEGIHFKSSVISIYVSESMDRSSKGQIIGNFQAFDEDTGLPAHARYVKLEDRDNWISVDSVTSEIKLAKLPDFESRYVQNGTYTVKIVAISEDYPRKTITGTVLINVEDINDNCPTLIEPVQTICHDAEYVNVTAEDLDGHPNSGPFSFSVIDKPPGMAEKWKIARQESTSVLLQQSEKKLGRSEIQFLISDNQGFSCPEKQVLTLTVCECLHGSGCREAQHDSYVGLGPAAIALMILAFLLLLLVPLLLLMCHCGKGAKGFTPIPGTIEMLHPWNNEGAPPEDKVVPSFLPVDQGGSLVGRNGVGGMAKEATMKGSSSASIVKGQHEMSEMDGRWEEHRSLLSGRATQFTGATGAIMTTETTKTARATGASRDMAGAQAAAVALNEEFLRNYFTDKAASYTEEDENHTAKDCLLVYSQEETESLNASIGCCSFIEGELDDRFLDDLGLKFKTLAEVCLGQKIDINKEIEQRQKPATETSMNTASHSLCEQTMVNSENTYSSGSSFPVPKSLQEANAEKVTQEIVTERSVSSRQAQKVATPLPDPMASRNVIATETSYVTGSTMPPTTVILGPSQPQSLIVTERVYAPASTLVDQPYANEGTVVVTERVIQPHGGGSNPLEGTQHLQDVPYVMVRERESFLAPSSGVQPTLAMPNIAVGQNVTVTERVLAPASTLQSSYQIPTENSMTARNTTVSGAGVPGPLPDFGLEESGHSNSTITTSSTRVTKHSTVQHSYS

SEQ ID NO: 506 - protein, 747 aa, Homo sapiens; identical to SEQ ID NO: 160

SEQ ID NO: 507 - protein, 713 aa, Homo sapiens; identical to SEQ ID NO: 147

SEQ ID NO: 508 - protein, 115 aa, Homo sapiens
MIPAKDMAKVMIVMLAICFLTKSDGKSVKKRSVSEIQLMHNLGKHLNSMERVEWLRKKLQDVHNFVALGAPLAPRDAGSQRPRKKEDNVLVESHEKSLGEADKADVNVLTKAKSQ

SEQ ID NO: 509 - protein, 730 aa, Homo sapiens
MPGVARLPLLLGLLLLPRPGRPLDLADYTYDLAEEDDSEPLNYKDPCKAAAFLGDIALDEEDLRAFQVQQAVDLRRHTARKSSIKAAVPGNTSTPSCQSTNGQPQRGACGRWRGRSRSRRAATSRPERVWPDGVIPFVIGGNFTGSQRAVFRQAMRHWEKHTCVTFLERTDEDSYIVFTYRPCGCCSYVGRRGGGPQAISIGKNCDKFGIVVHELGHVVGFWHEHTRPDRDRHVSIVRENIQPGQEYNFLKMEPQEVESLGETYDFDSIMHYARNTFSRGIFLDTIVPKYEVNGVKPPIGQRTRLSKGDIAQARKLYKCPACGETLQDSTGNFSSPEYPNGYSAHMHCVWRISVTPGEKIILNFTSLDLYRSRLCWYDYVEVRDGFWRKAPLRGRFCGSKLPEPIVSTDSRLWVEFRSSSNWVGKGFFAVYEAICGGDVKKDYGHIQSPNYPDDYRPSKVCIWRIQVSEGFHVGLTFQSFEIERHDSCAYDYLEVRDGHSESSTLIGRYCGYEKPDDIKSTSSRLWLKFVSDGSINKAGFAVNFFKEVDECSRPNRGGCEQRCLNTLGSYKCSCDPGYELAPDKRRCEAACGGFLTKLNGSITSPGWPKEYPPNKNCIWQLVAPTQYRISLQFDFFETEGNDVCKYDFVEVRSGLTADSKLHGKFCGSEKPEVITSQYNNMRVEFKSDNTVSKKGFKAHFFSEKRPALQPPRGRPHQLKFRVQKRNRTPQ

SEQ ID NO: 510 - protein, 302 aa, Homo sapiens
MPGVARLPLLLGLLLLPRPGRPLDLADYTYDLAEEDDSEPLNYKDPCKAAAFLGDIALDEEDLRAFQVQQAVDLRRHTARKSSIKAAVPGNTSTPSCQSTNGQPQRGACGRWRGRSRSRRAATSRPERVWPDGVIPFVIGGNFTGSQRAVFRQAMRHWEKHTCVTFLERTDEDSYIVFTYRPCGCCSYVGRRGGGPQAISIGKNCDKFGIVVHELGHVVGFWHEHTRPDRDRHVSIVRENIQPGVLHSSLLLLSCGSRNGASFPCSLESSTHQALCWTGLFLRPSPFPRLPLAAPRTLRAGV

SEQ ID NO: 511 - protein, 622 aa, Homo sapiens
MPGVARLPLLLGLLLLPRPGRPLDLADYTYDLAEEDDSEPLNYKDPCKAAAFLGDIALDEEDLRAFQVQQAVDLRRHTARKSSIKAAVPGNTSTPSCQSTNGQPQRGACGRWRGRSRSRRAATSRPERVWPDGVIPFVIGGNFTGSQRAVFRQAMRHWEKHTCVTFLERTDEDSYIVFTYRPCGCCSYVGRRGGGPQAISIGKNCDKFGIVVHELGHVVGFWHEHTRPDRDRHVSIVRENIQPGQEYNFLKMEPQEVESLGETYDFDSIMHYARNTFSRGIFLDTIVPKYEVNGVKPPIGQRTRLSKGDIAQARKLYKCPACGETLQDSTGNFSSPEYPNGYSAHMHCVWRISVTPGEKIILNFTSLDLYRSRLCWYDYVEVRDGFWRKAPLRGRFCGSKLPEPIVSTDSRLWVEFRSSSNWVGKGFFAVYEAICGGDVKKDYGHIQSPNYPDDYRPSKVCIWRIQVSEGFHVGLTFQSFEIERHDSCAYDYLEVRDGHSESSTLIGRYCGYEKPDDIKSTSSRLWLKFVSDGSINKAGFAVNFFKEVDECSRPNRGGCEQRCLNTLGSYKCSCDPGYELAPDKRRCEGCYDLQVGKPLLWDRHCFRLSTHGPEMLGTALRG

SEQ ID NO: 512 - protein, 717 aa, Homo sapiens
MPGVARLPLLLGLLLLPRPGRPLDLADYTYDLAEEDDSEPLNYKDPCKAAAFLGDIALDEEDLRAFQVQQAVDLRRHTARKSSIKAAVPGNTSTPSCQSTNGQPQRGACGRWRGRSRSRRAATSRPERVWPDGVIPFVIGGNFTGSQRAVFRQAMRHWEKHTCVTFLERTDEDSYIVFTYRPCGCCSYVGRRGGGPQAISIGKNCDKFGIVVHELGHVVGFWHEHTRPDRDRHVSIVRENIQPGQEYNFLKMEPQEVESLGETYDFDSIMHYARNTFSRGIFLDTIVPKYEVNGVKPPIGQRTRLSKGDIAQARKLYKCPACGETLQDSTGNFSSPEYPNGYSAHMHCVWRISVTPGEKIILNFTSLDLYRSRLCWYDYVEVRDGFWRKAPLRGRFCGSKLPEPIVSTDSRLWVEFRSSSNWVGKGFFAVYEAICGGDVKKDYGHIQSPNYPDDYRPSKVCIWRIQVSEGFHVGLTFQSFEIERHDSCAYDYLEVRDGHSESSTLIGRYCGYEKPDDIKSTSSRLWLKFVSDGSINKAGFAVNFFKEVDECSRPNRGGCEQRCLNTLGSYKCSCDPGYELAPDKRRCEAACGGFLTKLNGSITSPGWPKEYPPNKNCIWQLVAPTQYRISLQFDFFETEGNDVCKYDFVEVRSGLTADSKLHGKFCGSEKPEVITSQYNNMRVEFKSDNTVSKKGFKAHFFSGGELFGLLGHPPRRP

SEQ ID NO: 513 - protein, 823 aa, Homo sapiens
MPGVARLPLLLGLLLLPRPGRPLDLADYTYDLAEEDDSEPLNYKDPCKAAAFLGDIALDEEDLRAFQVQQAVDLRRHTARKSSIKAAVPGNTSTPSCQSTNGQPQRGACGRWRGRSRSRRAATSRPERVWPDGVIPFVIGGNFTGSQRAVFRQAMRHWEKHTCVTFLERTDEDSYIVFTYRPCGCCSYVGRRGGGPQAISIGKNCDKFGIVVHELGHVVGFWHEHTRPDRDRHVSIVRENIQPGQEYNFLKMEPQEVESLGETYDFDSIMHYARNTFSRGIFLDTIVPKYEVNGVKPPIGQRTRLSKGDIAQARKLYKCPACGETLQDSTGNFSSPEYPNGYSAHMHCVWRISVTPGEKIILNFTSLDLYRSRLCWYDYVEVRDGFWRKAPLRGRFCGSKLPEPIVSTDSRLWVEFRSSSNWVGKGFFAVYEAICGGDVKKDYGHIQSPNYPDDYRPSKVCIWRIQVSEGFHVGLTFQSFEIERHDSCAYDYLEVRDGHSESSTLIGRYCGYEKPDDIKSTSSRLWLKFVSDGSINKAGFAVNFFKEVDECSRPNRGGCEQRCLNTLGSYKCSCDPGYELAPDKRRCEAACGGFLTKLNGSITSPGWPKEYPPNKNCIWQLVAPTQYRISLQFDFFETEGNDVCKYDFVEVRSGLTADSKLHGKFCGSEKPEVITSQYNNMRVEFKSDNTVSKKGFKAHFFSVLEGAGDRHSHLSGLELLLCPHALVDTVPAPPSALHGDTHAHTHTHVHTHCPIAQETCRGPPLGASRLSPQGPGHLTLAPQEGSYLDFWDTHRGDPKPRRRRKSLKTFSLTPATFRGIWAL

SEQ ID NO: 514 - protein, 472 aa, Homo sapiens
MAGASRLLFLWLGCFCVSLAQGERPKPPFPELRKAVPGDRTAGGGPDSELQPQDKVSEHMLRLYDRYSTVQAARTPGSLEGGSQPWRPRLLREGNTVRSFRAAAAETLERKGLYIFNLTSLTKSENILSATLYFCIGELGNISLSCPVSGGCSHHAQRKHIQIDLSAWTLKFSRNQSQLLGHLSVDMAKSHRDIMSWLSKDITQLLRKAKENEEFLIGFNITSKGRQLPKRRLPFPEPYILVYANDAAISEPESVVSSLQGHRNFPTGTVPKWDSHIRAALSIERRKKRSTGVLLPLQNNELPGAEYQYKKDEVWEERKPYKTLQAQAPEKSKNKKKQRKGPHRKSQTLQFDEQTLKKARRKQWIEPRNCARRYLKVDFADIGWSEWIISPKSFDAYYCSGACQFPMPKSLKPSNHATIQSIVRAVGVVPGIPEPCCVPEKMSSLSILFFDENKNVVLKVYPNMTVESCACR

SEQ ID NO: 515 - protein, 417 aa, Homo sapiens
MHLTVFLLKGIVGFLWSCWVLVGYAKGGLGDNHVHSSFIYRRLRNHERREIQREILSILGLPHRPRPFSPGKQASSAPLFMLDLYNAMTNEENPEESEYSVRASLAEETRGARKGYPASPNGYPRRIQLSRTTPLTTQSPPLASLHDTNFLNDADMVMSFVNLVERDKDFSHQRRHYKEFRFDLTQIPHGEAVTAAEFRIYKDRSNNRFENETIKISIYQIIKEYTNRDADLFLLDTRKAQALDVGWLVFDITVTSNHWVINPQNNLGLQLCAETGDGRSINVKSAGLVGRQGPQSKQPFMVAFFKASEVLLRSVRAANKRKNQNRNKSSSHQDSSRMSSVGDYNTSEQKQACKKHELYVSFRDLGWQVHLMFPDHVPKPCCAPTKLNAISVLYFDDSSNVILKKYRNMVVRSCGCH

SEQ ID NO: 516 - protein, 475 aa, Homo sapiens
MESKALLVLTLAVWLQSLTASRGGVAAADQRRDFIDIESKFALRTPEDTAEDTCHLIPGVAESVATCHFNHSSKTFMVIHGWTVTGMYESWVPKLVAALYKREPDSNVIVVDWLSRAQEHYPVSAGYTKLVGQDVARFINWMEEEFNYPLDNVHLLGYSLGAHAAGIAGSLTNKKVNRITGLDPAGPNFEYAEAPSRLSPDDADFVDVLHTFTRGSPGRSIGIQKPVGHVDIYPNGGTFQPGCNIGEAIRVIAERGLGDVDQLVKCSHERSIHLFIDSLLNEENPSKAYRCSSKEAFEKGLCLSCRKNRCNNLGYEINKVRAKRSSKMYLKTRSQMPYKVFHYQVKIHFSGTESETHTNQAFEISLYGTVAESENIPFTLPEVSTNKTYSFLIYTEVDIGELLMLKLKWKSDSYFSWSDWWSSPGFAIQKIRVKAGETQKKVIFCSREKVSHLQKGKAPAVFVKCHDKSLNKKSG

SEQ ID NO: 517 - protein, 499 aa, Homo sapiens
MDTSPLCFSILLVLCIFIQSSALGQSLKPEPFGRRAQAVETNKTLHEMKTRFLLFGETNQGCQIRINHPDTLQECGFNSSLPLVMIIHGWSVDGVLENWIWQMVAALKSQPAQPVNVGLVDWITLAHDHYTIAVRNTRLVGKEVAALLRWLEESVQLSRSHVHLIGYSLGAHVSGFAGSSIGGTHKIGRITGLDAAGPLFEGSAPSNRLSPDDANFVDAIHTFTREHMGLSVGIKQPIGHYDFYPNGGSFQPGCHFLELYRHIAQHGFNAITQTIKCSHERSVHLFIDSLLHAGTQSMAYPCGDMNSFSQGLCLSCKKGRCNTLGYHVRQEPRSKSKRLFLVTRAQSPFKVYHYQFKIQFINQTETPIQTTFTMSLLGTKEKMQKIPITLGKGIASNKTYSFLITLDVDIGELIMIKFKWENSAVWANVWDTVQTIIPWSTGPRHSGLVLKTIRVKAGETQQRMTFCSENTDDLLLRPTQEKIFVKCEIKSKTSKRKIR

SEQ ID NO: 518 - protein, 465 aa, Homo sapiens
MLPLWTLSLLLGAVAGKEVCYERLGCFSDDSPWSGITERPLHILPWSPKDVNTRFLLYTNENPNNFQEVAADSSSISGSNFKTNRKTRFIIHGFIDKGEENWLANVCKNLFKVESVNCICVDWKGGSRTGYTQASQNIRIVGAEVAYFVEFLQSAFGYSPSNVHVIGHSLGAHAAGEAGRRTNGTIGRITGLDPAEPCFQGTPELVRLDPSDAKFVDVIHTDGAPIVPNLGFGMSQVVGHLDFFPNGGVEMPGCKKNILSQIVDIDGIWEGTRDFAACNHLRSYKYYTDSIVNPDGFAGFPCASYNVFTANKCFPCPSGGCPQMGHYADRYPGKTNDVGQKFYLDTGDASNFARWRYKVSVTLSGKKVTGHILVSLFGNKGNSKQYEIFKGTLKPDSTHSNEFDSDVDVGDLQMVKFIWYNNVINPTLPRVGASKIIVETNVGKQFNFCSPETVREEVLLTLTPC

SEQ ID NO: 519 - protein, 500 aa, Homo sapiens
MSNSVPLLCFWSLCYCFAAGSPVPFGPEGRLEDKLHKPKATQTEVKPSVRFNLRTSKDPEHEGCYLSVGHSQPLEDCSFNMTAKTFFIIHGWTMSGIFENWLHKLVSALHTREKDANVVVVDWLPLAHQLYTDAVNNTRVVGHSIARMLDWLQEKDDFSLGNVHLIGYSLGAHVAGYAGNFVKGTVGRITGLDPAGPMFEGADIHKRLSPDDADFVDVLHTYTRSFGLSIGIQMPVGHIDIYPNGGDFQPGCGLNDVLGSIAYGTITEVVKCEHERAVHLFVDSLVNQDKPSFAFQCTDSNRFKKGICLSCRKNRCNSIGYNAKKMRNKRNSKMYLKTRAGMPFRVYHYQMKIHVFSYKNMGEIEPTFYVTLYGTNADSQTLPLEIVERIEQNATNTFLVYTEEDLGDLLKIQLTWEGASQSWYNLWKEFRSYLSQPRNPGRELNIRRIRVKSGETQRKLTFCTEDPENTSISPGRELWFRKCRDGWRMKNETSPTVELP

SEQ ID NO: 520 - protein, 399 aa, Homo sapiens
MKMRFLGLVVCLVLWTLHSEGSGGKLTAVDPETNMNVSEIISYWGFPSEEYLVETEDGYILCLNRIPHGRKNHSDKGPKPVVFLQHGLLADSSNWVTNLANSSLGFILADAGFDVWMGNSRGNTWSRKHKTLSVSQDEFWAFSYDEMAKYDLPASINFILNKTGQEQVYYVGHSQGTTIGFIAFSQIPELAKRIKMFFALGPVASVAFCTSPMAKLGRLPDHLIKDLFGDKEFLPQSAFLKWLGTHVCTHVILKELCGNLCFLLCGFNERNLNMSRVDVYTTHSPAGTSVQNMLHWSQAVKFQKFQAFDWGSSAKNYFHYNQSYPPTYNVKDMLVPTAVWSGGHDWLADVYDVNILLTQITNLVFHESIPEWEHLDFIWGLDAPWRLYNKIINLMRKYQ

SEQ ID NO: 521 - protein, 1076 aa, Homo sapiens
MEPGSKSVSRSDWQPEPHQRPITPLEPGPEKTPIAQPESKTLQGSNTQQKPASNQRPLTQQETPAQHDAESQKEPRAQQKSASQEEFLAPQKPAPQQSPYIQRVLLTQQEAASQQGPGLGKESITQQEPALRQRHVAQPGPGPGEPPPAQQEAESTPAAQAKPGAKREPSAPTESTSQETPEQSDKQTTPVQGAKSKQGSLTELGFLTKLQELSIQRSALEWKALSEWVTDSESESDVGSSSDTDSPATMGGMVAQGVKLGFKGKSGYKVMSGYSGTSPHEKTSARNHRHYQDTASRLIHNMDLRTMTQSLVTLAEDNIAFFSSQGPGETAQRLSGVFAGVREQALGLEPALGRLLGVAHLFDLDPETPANGYRSLVHTARCCLAHLLHKSRYVASNRRSIFFRTSHNLAELEAYLAALTQLRALVYYAQRLLVTNRPGVLFFEGDEGLTADFLREYVTLHKGCFYGRCLGFQFTPAIRPFLQTISIGLVSFGEHYKRNETGLSVAASSLFTSGRFAIDPELRGAEFERITQNLDVHFWKAFWNITEMEVLSSLANMASATVRVSRLLSLPPEAFEMPLTADPTLTVTISPPLAHTGPGPVLVRLISYDLREGQDSEELSSLIKSNGQRSLELWPRPQQAPRSRSLIVHFHGGGFVAQTSRSHEPYLKSWAQELGAPIISIDYSLAPEAPFPRALEECFFAYCWAIKHCALLGSTGERICLAGDSAGGNLCFTVALRAAAYGVRVPDGIMAAYPATMLQPAASPSRLLSLMDPLLPLSVLSKCVSAYAGAKTEDHSNSDQKALGMMGLVRRDTALLLRDFRLGASSWLNSFLELSGRKSQKMSEPIAEPMRRSVSEAALAQPQGPLGTDSLKNLTLRDLSLRGNSETSSDTPEMSLSAETLSPSTPSDVNFLLPPEDAGEEAEAKNELSPMDRGLGVRAAFPEGFHPRRSSQGATQMPLYSSPIVKNPFMSPLLAPDSMLKSLPPVHIVACALDPMLDDSVMLARRLRNLGQPVTLRVVEDLPHGFLTLAALCRETRQAAELCVERIRLVLTPPAGAGPSGETGAAGVDGGCGGRH

SEQ ID NO: 522 - protein, 398 aa, Homo sapiens
MWLLLTMASLISVLGTTHGLFGKLHPGSPEVTMNISQMITYWGYPNEEYEVVTEDGYILEVNRIPYGKKNSGNTGQRPVVFLQHGLLASATNWISNLPNNSLAFILADAGYDVWLGNSRGNTWARRNLYYSPDSVEFWAFSFDEMAKYDLPATIDFIVKKTGQKQLHYVGHSQGTTIGFIAFSTNPSLAKRIKTFYALAPVATVKYTKSLINKLRFVPQSLFKFIFGDKIFYPHNFFDQFLATEVCSREMLNLLCSNALFIICGFDSKNFNTSRLDVYLSHNPAGTSVQNMFHWTQAVKSGKFQAYDWGSPVQNRMHYDQSQPPYYNVTAMNVPIAVWNGGKDLLADPQDVGLLLPKLPNLIYHKEIPFYNHLDFIWAMDAPQEVYNDIVSMISEDKK

SEQ ID NO: 523 - protein, 467 aa, Homo sapiens
MLIFWTITLFLLGAAKGKEVCYEDLGCFSDTEPWGGTAIRPLKILPWSPEKIGTRFLLYTNENPNNFQILLLSDPSTIEASNFQMDRKTRFIIHGFIDKGDESWVTDMCKKLFEVEEVNCICVDWKKGSQATYTQAANNVRVVGAQVAQMLDILLTEYSYPPSKVHLIGHSLGAHVAGEAGSKTPGLSRITGLDPVEASFESTPEEVRLDPSDADFVDVIHTDAAPLIPFLGFGTNQQMGHLDFFPNGGESMPGCKKNALSQIVDLDGIWAGTRDFVACNHLRSYKYYLESILNPDGFAAYPCTSYKSFESDKCFPCPDQGCPQMGHYADKFAGRTSEEQQKFFLNTGEASNFARWRYGVSITLSGRTATGQIKVALFGNKGNTHQYSIFRGILKPGSTHSYEFDAKLDVGTIEKVKFLWNNNVINPTLPKVGATKITVQKGEEKTVYNFCSEDTVREDTLLTLTPC

SEQ ID NO: 524 - protein, 469 aa, Homo sapiens
MLPPWTLGLLLLATVRGKEVCYGQLGCFSDEKPWAGTLQRPVKLLPWSPEDIDTRFLLYTNENPNNFQLITGTEPDTIEASNFQLDRKTRFIIHGFLDKAEDSWPSDMCKKMFEVEKVNCICVDWRHGSRAMYTQAVQNIRVVGAETAFLIQALSTQLGYSLEDVHVIGHSLGAHTAAEAGRRLGGRVGRITGLDPAGPCFQDEPEEVRLDPSDAVFVDVIHTDSSPIVPSLGFGMSQKVGHLDFFPNGGKEMPGCKKNVLSTITDIDGIWEGIGGFVSCNHLRSFEYYSSSVLNPDGFLGYPCASYDEFQESKCFPCPAEGCPKMGHYADQFKGKTSAVEQTFFLNTGESGNFTSWRYKVSVTLSGKEKVNGYIRIALYGSNENSKQYEIFKGSLKPDASHTCAIDVDFNVGKIQKVKFLWNKRGINLSEPKLGASQITVQSGEDGTEYNFCSSDTVEENVLQSLYPC

SEQ ID NO: 525 - protein, 753 aa, Homo sapiens
MGRLQLVVLGLTCCWAVASAAKLGAVYTEGGFVEGVNKKLGLLGDSVDIFKGIPFAAPTKALENPQPHPGWQGTLKAKNFKKRCLQATITQDSTYGDEDCLYLNIWVPQGRKQVSRDLPVMIWIYGGAFLMGSGHGANFLNNYLYDGEEIATRGNVIVVTFNYRVGPLGFLSTGDANLPGNYGLRDQHMAIAWVKRNIAAFGGDPNNITLFGESAGGASVSLQTLSPYNKGLIRRAISQSGVALSPWVIQKNPLFWAKKVAEKVGCPVGDAARMAQCLKVTDPRALTLAYKVPLAGLEYPMLHYVGFVPVIDGDFIPADPINLYANAADIDYIAGTNNMDGHIFASIDMPAINKGNKKVTEEDFYKLVSEFTITKGLRGAKTTFDVYTESWAQDPSQENKKKTVVDFETDVLFLVPTEIALAQHRANAKSAKTYAYLFSHPSRMPVYPKWVGADHADDIQYVFGKPFATPTGYRPQDRTVSKAMIAYWTNFAKTGDPNMGDSAVPTHWEPYTTENSGYLEITKKMGSSSMKRSLRTNFLRYWTLTYLALPTVTDQEATPVPPTGDSEATPVPPTGDSETAPVPPTGDSGAPPVPPTGDSGAPPVPPTGDSGAPPVPPTGDSGAPPVPPTGDSGAPPVPPTGDSGAPPVPPTGDSGAPPVPPTGDSGAPPVPPTGDAGPPPVPPTGDSGAPPVPPTGDSGAPPVTPTGDSETAPVPPTGDSGAPPVPPTGDSEAAPVPPTDDSKEAQMPAVIRF

SEQ ID NO: 526 - protein, 13 aa, Homo sapiens
SYSMEHFRWGKPV

SEQ ID NO: 527 - protein, 18 aa, Homo sapiens
DEGPYRMEHFRWGSPPKD

SEQ ID NO: 528 - protein, 11 aa, Homo sapiens
YVMGHFRWDRF

SEQ ID NO: 529 - protein, 267 aa, Homo sapiens; identical to SEQ ID NO: 158

SEQ ID NO: 530 - protein, 189 aa, Homo sapiens
MASPFALLMVLVVLSCKSSCSLGCDLPETHSLDNRRTLMLLAQMSRISPSSCLMDRHDFGFPQEEFDGNQFQKAPAISVLHELIQQIFNLFTTKDSSAAWDEDLLDKFCTELYQQLNDLEACVMQEERVGETPLMNADSILAVKKYFRRITLYLTEKKYSPCAWEVVRAEIMRSLSLSTNLQERLRRKE

SEQ ID NO: 531 - protein, 188 aa, Homo sapiens [sequence omitted]

SEQ ID NO: 532 - protein, 189 aa, Homo sapiens
MALSFSLLMAVLVLSYKSICSLGCDLPQTHSLGNRRALILLAQMGRISHFSCLKDRHDFGFPEEEFDGHQFQKAQAISVLHEMIQQTFNLFSTEDSSAAWEQSLLEKFSTELYQQLNDLEACVIQEVGVEETPLMNEDSILAVRKYFQRITLYLTEKKYSPCAWEVVRAEIMRSLSFSTNLQKRLRRKD

SEQ ID NO: 533 - protein, 189 aa, Homo sapiens
MALPFVLLMALVVLNCKSICSLGCDLPQTHSLSNRRTLMIMAQMGRISPFSCLKDRHDFGFPQEEFDGNQFQKAQAISVLHEMIQQTFNLFSTKDSSATWDETLLDKFYTELYQQLNDLEACMMQEVGVEDTPLMNVDSILTVRKYFQRITLYLTEKKYSPCAWEVVRAEIMRSFSLSANLQERLRRKE

SEQ ID NO: 534 - protein, 189 aa, Homo sapiens
MALPFALLMALVVLSCKSSCSLDCDLPQTHSLGHRRTMMLLAQMRRISLFSCLKDRHDFRFPQEEFDGNQFQKAEAISVLHEVIQQTFNLFSTKDSSVAWDERLLDKLYTELYQQLNDLEACVMQEVWVGGTPLMNEDSILAVRKYFQRITLYLTEKKYSPCAWEVVRAEIMRSFSSSRNLQERLRRKE

SEQ ID NO: 535 - protein, 189 aa, Homo sapiens
MARSFSLLMVVLVLSYKSICSLGCDLPQTHSLRNRRALILLAQMGRISPFSCLKDRHEFRFPEEEFDGHQFQKTQAISVLHEMIQQTFNLFSTEDSSAAWEQSLLEKFSTELYQQLNDLEACVIQEVGVEETPLMNEDFILAVRKYFQRITLYLMEKKYSPCAWEVVRAEIMRSFSFSTNLKKGLRRKD

SEQ ID NO: 536 - protein, 189 aa, Homo sapiens
MALTFYLLVALVVLSYKSFSSLGCDLPQTHSLGNRRALILLAQMRRISPFSCLKDRHDFEFPQEEFDDKQFQKAQAISVLHEMIQQTFNLFSTKDSSAALDETLLDEFYIELDQQLNDLESCVMQEVGVIESPLMYEDSILAVRKYFQRITLYLTEKKYSSCAWEVVRAEIMRSFSLSINLQKRLKSKE

SEQ ID NO: 537 - protein, 189 aa, Homo sapiens
MALSFSLLMAVLVLSYKSICSLGCDLPQTHSLGNRRALILLGQMGRISPFSCLKDRHDFRIPQEEFDGNQFQKAQAISVLHEMIQQTFNLFSTEDSSAAWEQSLLEKFSTELYQQLNDLEACVIQEVGVEETPLMNEDSILAVRKYFQRITLYLIERKYSPCAWEVVRAEIMRSLSFSTNLQKRLRRKD

SEQ ID NO: 538 - protein, 189 aa, Homo sapiens
MALPFALMMALVVLSCKSSCSLGCNLSQTHSLNNRRTLMLMAQMRRISPFSCLKDRHDFEFPQEEFDGNQFQKAQAISVLHEMMQQTFNLFSTKNSSAAWDETLLEKFYIELFQQMNDLEACVIQEVGVEETPLMNEDSILAVKKYFQRITLYLMEKKYSPCAWEVVRAEIMRSLSFSTNLQKRLRRKD

SEQ ID NO: 539 - protein, 189 aa, Homo sapiens
MALSFSLLMAVLVLSYKSICSLGCDLPQTHSLGNRRALILLAQMGRISHFSCLKDRYDFGFPQEVFDGNQFQKAQAISAFHEMIQQTFNLFSTKDSSAAWDETLLDKFYIELFQQLNDLEACVTQEVGVEEIALMNEDSILAVRKYFQRITLYLMGKKYSPCAWEVVRAEIMRSFSFSTNLQKGLRRKD

SEQ ID NO: 540 - protein, 189 aa, Homo sapiens
MALSFSLLMAVLVLSYKSICSLGCDLPQTHSLGNRRALILLAQMGRISPFSCLKDRHDFGLPQEEFDGNQFQKTQAISVLHEMIQQTFNLFSTEDSSAAWEQSLLEKFSTELYQQLNNLEACVIQEVGMEETPLMNEDSILAVRKYFQRITLYLTEKKYSPCAWEVVRAEIMRSLSFSTNLQKILRRKD

SEQ ID NO: 541 - protein, 189 aa, Homo sapiens
MALSFSLLMAVLVLSYKSICSLGCDLPQTHSLGNRRALILLAQMGRISPFSCLKDRHDFGFPQEEFDGNQFQKAQAISVLHEMIQQTFNLFSTKDSSATWEQSLLEKFSTELNQQLNDLEACVIQEVGVEETPLMNVDSILAVKKYFQRITLYLTEKKYSPCAWEVVRAEIMRSFSLSKIFQERLRRKE

SEQ ID NO: 542 - protein, 166 aa, Homo sapiens
MKYTSYILAFQLCIVLGSLGCYCQDPYVKEAENLKKYFNAGHSDVADNGTLFLGILKNWKEESDRKIMQSQIVSFYFKLFKNFKDDQSIQKSVETIKEDMNVKFFNSNKKKRDDFEKLTNYSVTDLNVQRKAIHELIQVMAELSPAAKTGKRKRSQMLFRGRRASQ

SEQ ID NO: 543 - protein, 187 aa, Homo sapiens
MTNKCLLQIALLLCFSTTALSMSYNLLGFLQRSSNFQCQKLLWQLNGRLEYCLKDRMNFDIPEEIKQLQQFQKEDAALTIYEMLQNIFAIFRQDSSSTGWNETIVENLLANVYHQINHLKTVLEEKLEKEDFTRGKLMSSLHLKRYYGRILHYLKAKEYSHCAWTIVRVEILRNFYFINRLTGYLRN

SEQ ID NO: 544 - protein, 207 aa, Homo sapiens
MSTKPDMIQKCLWLEILMGIFIAGTLSLDCNLLNVHLRRVTWQNLRHLSSMSNSFPVECLRENIAFELPQEFLQYTQPMKRDIKKAFYEMSLQAFNIFSQHTFKYWKERHLKQIQIGLDQQAEYLNQCLEEDKNENEDMKEMKENEMKPSEARVPQLSSLELRRYFHRIDNFLKEKKYSDCAWEIVRVEIRRCLYYFYKFTALFRRK

SEQ ID NO: 545 - protein, 208 aa, Homo sapiens
MIIKHFFGTVLVLLASTTIFSLDLKLIIFQQRQVNQESLKLLNKLQTLSIQQCLPHRKNFLLPQKSLSPQQYQKGHTLAILHEMLQQIFSLFRANISLDGWEENHTEKFLIQLHQQLEYLEALMGLEAEKLSGTLGSDNLRLQVKMYFRRIHDYLENQDYSTCAWAIVQVEISRCLFFVFSLTEKLSKQGRPLNDMKQELTTEFRSPR

SEQ ID NO: 546 - protein, 4 aa, Homo sapiens
EYFY

SEQ ID NO: 547 - protein, 4 aa, Homo sapiens
GHGG

SEQ ID NO: 548 - protein, 153 aa, Homo sapiens
MYRMQLLSCIALSLALVTNSAPTSSSTKKTQLQLEHLLLDLQMILNGINNYKNPKLTRMLTFKFYMPKKATELKHLQCLEEELKPLEEVLNLAQSKNFHLRPRDLISNINVIVLELKGSETTFMCEYADETATIVEFLNRWITFCQSIISTLT

SEQ ID NO: 549 - protein, 136 aa, Homo sapiens [sequence omitted]

SEQ ID NO: 550 - protein, 135 aa, Homo sapiens
MYRMQLLSCIALSLALVTNSANWVNVISDLKKIEDLIQSMHIDATLYTESDVHPSCKVTAMKCFLLELQVISLESGDASIHDTVENLIILANNSLSSNGNVTESGCKECEELEEKNIKEFLQSFVHIVQMFINTS

SEQ ID NO: 551 - protein, 153 aa, Homo sapiens
MYRMQLLSCIALSLALVTNSGIHVFILGCFSAGLPKTEANWVNVISDLKKIEDLIQSMHIDATLYTESDVHPSCKVTAMKCFLLELQVISLESGDASIHDTVENLIILANNSLSSNGNVTESGCKECEELEEKNIKEFLQSFVHIVQMFINTS

SEQ ID NO: 552 - protein, 162 aa, Homo sapiens
MNSFSTSAFGPVAFSLGLLLVLPAAFPAPGIHVFILGCFSAGLPKTEANWVNVISDLKKIEDLIQSMHIDATLYTESDVHPSCKVTAMKCFLLELQVISLESGDASIHDTVENLIILANNSLSSNGNVTESGCKECEELEEKNIKEFLQSFVHIVQMFINTS

SEQ ID NO: 553 - protein, 166 aa, Homo sapiens
MAALQKSVSSFLMGTLATSCLLLLALLVQGGAAGIHVFILGCFSAGLPKTEANWVNVISDLKKIEDLIQSMHIDATLYTESDVHPSCKVTAMKCFLLELQVISLESGDASIHDTVENLIILANNSLSSNGNVTESGCKECEELEEKNIKEFLQSFVHIVQMFINTS

SEQ ID NO: 554 - protein, 179 aa, Homo sapiens
MAALQKSVSSFLMGTLATSCLLLLALLVQGGAAAPISSHCRLDKSNFQQPYITNRTFMLAKEASLADNNTDVRLIGEKLFHGVSMSERCYLMKQVLNFTLEEVLFPQSDRFQPYMQEVVPFLARLSNRLSTCHIEGDDLHIQRNVQKLKDTVKKLGESGEIKAIGELDLLFMSLRNACI

SEQ ID NO: 555 - protein, 155 aa, Homo sapiens; identical to SEQ ID NO: 106

SEQ ID NO: 556 - protein, 135 aa, Homo sapiens
MGNYKPKLLYCSNGGHFLRILPDGTVDGTRDRSDQHIQLQLSAESVGEVYIKSTETGQYLAMDTDGLLYGSQTPNEECLFLERLEENHYNTYISKKHAEKNWFVGLKKNGSCKRGPRTHYGQKAILFLPLPVSSD

SEQ ID NO: 557 - protein, 153 aa, Homo sapiens
MTNKCLLQIALLLCFSTTALSMKPKLLYCSNGGHFLRILPDGTVDGTRDRSDQHIQLQLSAESVGEVYIKSTETGQYLAMDTDGLLYGSQTPNEECLFLERLEENHYNTYISKKHAEKNWFVGLKKNGSCKRGPRTHYGQKAILFLPLPVSSD

SEQ ID NO: 558 - protein, 211 aa, Homo sapiens
MRSGCVVVHVWILAGLWLAVAGRDSSPLVHYGWGDPIRLRHLYTSGPHGLSSCFLRIRADGVVDCARGQSAHSLLEIKAVALRTVAIKGVHSVRYLCMGADGKMQGLLQYSEEDCAFEEEIRPDGYNVYRSEKHRLPVSLSSAKQRQLYKNRGFLPLSHFLPMLPMVPEEPEDLRGHLESDMFSSPLETDSMDPFGLVTGLEAVRSPSFEK

SEQ ID NO: 559 - protein, 209 aa, Homo sapiens
MDSDETGFEHSGLWVSVLAGLLLGACQAHPIPDSSPLLQFGGQVRQRYLYTDDAQQTEAHLEIREDGTVGGAADQSPESLLQLKALKPGVIQILGVKTSRFLCQRPDGALYGSLHFDPEACSFRELLLEDGYNVYQSEAHGLPLHLPGNKSPHRDPAPRGPARFLPLPGLPPALPEPPGILAPQPPDVGSSDPLSMVGPSQGRSPSYAS

SEQ ID NO: 560 - protein, 251 aa, Homo sapiens
MLGARLRLWVCALCSVCSMSVLRAYPNASPLLGSSWGGLIHLYTATARNSYHLQIHKNGHVDGAPHQTIYSALMIRSEDAGFVVITGVMSRRYLCMDFRGNIFGSHYFDPENCRFQHQTLENGYDVYHSPQYHFLVSLGRAKRAFLPGMNPPPYSQFLSRRNEIPLIHFNTPIPRRHTRSAEDDSERDPLNVLKPRARMTPAPASCSQELPSAEDNSPMASDPLGVVRGGRVNTHAGGTGPEGCRPFAKFI

SEQ ID NO: 561 - protein, 247 aa, Homo sapiens
MTILFLTMVISYFGCMKAAPMKEANIRGQGGLAYPGVRTHGTLESVNGPKAGSRGLTSLADTFEHVIEELLDEDQKVRPNEENNKDADLYTSRVMLSSQVPLEPPLLFLLEEYKNYLDAANMSMRVRRHSDPARRGELSVCDSISEWVTAADKKTAVDMSGGTVTVLEKVPVSKGQLKQYFYETKCNPMGYTKEGCRGIDKRHWNSQCRTTQSYVRALTMDSKKRIGWRFIRIDTSCVCTLTIKRGR

SEQ ID NO: 562 - protein, 379 aa, Homo sapiens
MEQLSSANTRFALDLFLALSENNPAGNIFISPFSISSAMAMVFLGTRGNTAAQLSKTFHFNTVEEVHSRFQSLNADINKRGASYILKLANRLYGEKTYNFLPEFLVSTQKTYGADLASVDFQHASEDARKTINQWVKGQTEGKIPELLASGMVDNMTKLVLVNAIYFKGNWKDKFMKEATTNAPFRLNKKDRKTVKMMYQKKKFAYGYIEDLKCRVLELPYQGEELSMVILLPDDIEDESTGLKKIEEQLTLEKLHEWTKPENLDFIEVNVSLPRFKLEESYTLNSDLARLGVQDLFNSSKADLSGMSGARDIFISKIVHKSFVEVNEEGTEAAAATAGIATFCMLMPEENFTADHPFLFFIRHNSSGSILFLGRFSSP

SEQ ID NO: 563 - protein, 404 aa, Homo sapiens
MADKVLKEKRKLFIRSMGEGTINGLLDELLQTRVLNKEEMEKVKRENATVMDKTRALIDSVIPKGAQACQICITYICEEDSYLAGTLGLSADQTSGNYLNMQDSQGVLSSFPAPQAVQDNPAMPTSSGSEGNVKLCSLEEAQRIWKQKSAEIYPIMDKSSRTRLALIICNEEFDSIPRRTGAEVDITGMTMLLQNLGYSVDVKKNLTASDMTTELEAFAHRPEHKTSDSTFLVFMSHGIREGICGKKHSEQVPDILQLNAIFNMLNTKNCPSLKDKPKVIIIQACRGDSPGVVWFKDSVGVSGNLSLPTTEEFEDDAIKKAHIEKDFIAFCSSTPDNVSWRHPTMGSVFIGRLIEHMQEYACSCDVEEIFRKVRFSFEQPDGRAQMPTTERVTLTRCFYLFPGH

SEQ ID NO: 564 - protein, 202 aa, Homo sapiens
MKVLAAGVVPLLLVLHWKHGAGSPLPITPVNATCAIRHPCHNNLMNQIRSQLAQLNGSANALFILYYTAQGEPFPNNLDKLCGPNVTDFPPFHANGTEKAKLVELYRIVVYLGTSLGNITRDQKILNPSALSLHSKLNATADILRGLLSNVLCRLCSKYHVGHVDVTYGPDTSGKDVFQKKKLGCQLLGKYKQIIAVLAQAF

SEQ ID NO: 565 - protein, 161 aa, Homo sapiens
MDSDETGFEHSGLWVSVLAGLLLGACQAGIHVFILGCFSAGLPKTEANWVNVISDLKKIEDLIQSMHIDATLYTESDVHPSCKVTAMKCFLLELQVISLESGDASIHDTVENLIILANNSLSSNGNVTESGCKECEELEEKNIKEFLQSFVHIVQMFINTS

SEQ ID NO: 566 - protein, 154 aa, Homo sapiens
MTNKCLLQIALLLCFSTTALSMKKPKLLYCSNGGHFLRILPDGTVDGTRDRSDQHIQLQLSAESVGEVYIKSTETGQYLAMDTDGLLYGSQTPNEECLFLERLEENHYNTYISKKHAEKNWFVGLKKNGSCKRGPRTHYGQKAILFLPLPVSSD

SEQ ID NO: 567 - protein, 753 aa, Homo sapiens
MERRAWSLQCTAFVLFCAWCALNSAKAKRQFVNEWAAEIPGGPEAASAIAEELGYDLLGQIGSLENHYLFKHKNHPRRSRRSAFHITKRLSDDDRVIWAEQQYEKERSKRSALRDSALNLFNDPMWNQQWYLQDTRMTAALPKLDLHVIPVWQKGITGKGVVITVLDDGLEWNHTDIYANYDPEASYDFNDNDHDPFPRYDPTNENKHGTRCAGEIAMQANNHKCGVGVAYNSKVGGIRMLDGIVTDAIEASSIGFNPGHVDIYSASWGPNDDGKTVEGPGRLAQKAFEYGVKQGRQGKGSIFVWASGNGGRQGDNCDCDGYTDSIYTISISSASQQGLSPWYAEKCSSTLATSYSSGDYTDQRITSADLHNDCTETHTGTSASAPLAAGIFALALEANPNLTWRDMQHLVVWTSEYDPLANNPGWKKNGAGLMVNSRFGFGLLNAKALVDLADPRTWRSVPEKKECVVKDNDFEPRALKANGEVIIEIPTRACEGQENAIKSLEHVQFEATIEYSRRGDLHVTLTSAAGTSTVLLAERERDTSPNGFKNWDFMSVHTWGENPIGTWTLRITDMSGRIQNEGRIVNWKLILHGTSSQPEHMKQPRVYTSYNTVQNDRRGVEKMVDPGEEQPTQENPKENTLVSKSPSSSSVGGRRDELEEGAPSQAMLRLLQSAFSKNSPPKQSPKKSPSAKLNIPYENFYEALEKLNKPSQLKDSEDSLYNDYVDVFYNTKPYKHRDDRLLQALVDILNEEN

SEQ ID NO: 568 - protein, 638 aa, Homo sapiens
MKGGCVSQWKAAAGFLFCVMVFASAERPVFTNHFLVELHKGGEDKARQVAAEHGFGVRKLPFAEGLYHFYHNGLAKAKRRRSLHHKQQLERDPRVKMALQQEGFDRKKRGYRDINEIDINMNDPLFTKQWYLINTGQADGTPGLDLNVAEAWELGYTGKGVTIGIMDDGIDYLHPDLASNYNAEASYDFSSNDPYPYPRYTDDWFNSHGTRCAGEVSAAANNNICGVGVAYNSKVAGIRMLDQPFMTDIIEASSISHMPQLIDIYSASWGPTDNGKTVDGPRELTLQAMADGVNKGRGGKGSIYVWASGDGGSYDDCNCDGYASSMWTISINSAINDGRTALYDESCSSTLASTFSNGRKRNPEAGVATTDLYGNCTLRHSGTSAAAPEAAGVFALALEANLGLTWRDMQHLTVLTSKRNQLHDEVHQWRRNGVGLEFNHLFGYGVLDAGAMVKMAKDWKTVPERFHCVGGSVQDPEKIPSTGKLVLTLTTDACEGKENFVRYLEHVQAVITVNATRRGDLNINMTSPMGTKSILLSRRPRDDDSKVGFDKWPFMTTHTWGEDARGTWTLELGFVGSAPQKGVLKEWTLMLHGTQSAPYIDQVVRDYQSKLAMSKKEELEEELDEAVERSLKSILNKN

SEQ ID NO: 569 - protein, 794 aa, Homo sapiens; identical to SEQ ID NO: 189

SEQ ID NO: 570 - protein, 715 aa, Homo sapiens
MELRPWLLWVVAATGTLVLLAADAQGQKVFTNTWAVRIPGGPAVANSVARKHGFLNLGQIFGDYYHFWHRGVTKRSLSPHRPRHSRLQREPQVQWLEQQVAKRRTKRDVYQEPTDPKFPQQWYLSGVTQRDLNVKAAWAQGYTGHGIVVSILDDGIEKNHPDLAGNYDPGASFDVNDQDPDPQPRYTQMNDNRHGTRCAGEVAAVANNGVCGVGVAYNARIGGVRMLDGEVTDAVEARSLGLNPNHIHIYSASWGPEDDGKTVDGPARLAEEAFFRGVSQGRGGLGSIFVWASGNGGREHDSCNCDGYTNSIYTLSISSATQFGNVPWYSEACSSTLATTYSSGNQNEKQIVTTDLRQKCTESHTGTSASAPLAAGIIALTLEANKNLTWRDMQHLVVQTSKPAHLNANDWATNGVGRKVSHSYGYGLLDAGAMVALAQNWTTVAPQRKCIIDILTEPKDIGKRLEVRKTVTACLGEPNHITRLEHAQARLTLSYNRRGDLAIHLVSPMGTRSTLLAARPHDYSADGFNDWAFMTTHSWDEDPSGEWVLEIENTSEANNYGTLTKFTLVLYGTAPEGLPVPPESSGCKTLTSSQACVVCEEGFSLHQKSCVQHCPPGFAPQVLDTHYSTENDVETIRASVCAPCHASCATCQGPALTDCLSCPSHASLDPVEQTCSRQSQSSRESPPQQQPPRLPPEVEAGQRLRAGLLPSHLPE

SEQ ID NO: 571 - protein, 755 aa, Homo sapiens
MRPAPIALWLRLVLALALVRPRAVGWAPVRAPIYVSSWAVQVSQGNREVERLARKFGFVNLGPIFPDGQYFHLRHRGVVQQSLTPHWGHRLHLKKNPKVQWFQQQTLQRRVKRSVVVPTDPWFSKQWYMNSEAQPDLSILQAWSQGLSGQGIVVSVLDDGIEKDHPDLWANYDPLASYDFNDYDPDPQPRYTPSKENRHGTRCAGEVAAMANNGFCGVGVAFNARIGGVRMLDGTITDVIEAQSLSLQPQHIHIYSASWGPEDDGRTVDGPGILTREAFRRGVTKGRGGLGTLFIWASGNGGLHYDNCNCDGYTNSIHTLSVGSTTQQGRVPWYSEACASTLTTTYSSGVATDPQIVTTDLHHGCTDQHTGTSASAPLAAGMIALALEANPFLTWRDMQHLVVRASKPAHLQAEDWRTNGVGRQVSHHYGYGLLDAGLLVDTARTWLPTQPQRKCAVRVQSRPTPILPLIYIRENVSACAGLHNSIRSLEHVQAQLTLSYSRRGDLEISLTSPMGTRSTLVAIRPLDVSTEGYNNWVFMSTHFWDENPQGVWTLGLENKGYYFNTGTLYRYTLLLYGTAEDMTARPTGPQVTSSACVQRDTEGLCQACDGPAYILGQLCLAYCPPRFFNHTRLVTAGPGHTAAPALRVCSSCHASCYTCRGGSPRDCTSCPPSSTLDQQQGSCMGPTTPDSRPRLRAAACPHHRCPASAMVLSLLAVTLGGPVLCGMSMDLPLYAWLSRARATPTKPQVWLPAGT

SEQ ID NO: 572 - protein, 1860 aa, Homo sapiens
MGWGSRCCCPGRLDLLCVLALLGGCLLPVCRTRVYTNHWAVKIAGGFPEANRIASKYGFINIGQIGALKDYYHFYHSRTIKRSVISSRGTHSFISMEPKVEWIQQQVVKKRTKRDYDFSRAQSTYFNDPKWPSMWYMHCSDNTHPCQSDMNIEGAWKRGYTGKNIVVTILDDGIERTHPDLMQNYDALASCDVNGNDLDPMPRYDASNENKHGTRCAGEVAAAANNSHCTVGIAFNAKIGGVRMLDGDVTDMVEAKSVSFNPQHVHIYSASWGPDDDGKTVDGPAPLTRQAFENGVRMGRRGLGSVFVWASGNGGRSKDHCSCDGYTNSIYTISISSTAESGKKPWYLEECSSTLATTYSSGESYDKKIITTDLRQRCTDNHTGTSASAPMAAGIIALALEANPFLTWRDVQHVIVRTSRAGHLNANDWKTNAAGFKVSHLYGFGLMDAEAMVMEAEKWTTVPRQHVCVESTDRQIKTIRPNSAVRSIYKASGCSDNPNRHVNYLEHVVVRITITHPRRGDLAIYLTSPSGTRSQLLANRLFDHSMEGFKNWEFMTIHCWGERAAGDWVLEVYDTPSQLRNFKTPGKLKEWSLVLYGTSVQPYSPTNEFPKVERFRYSRVEDPTDDYGTEDYAGPCDPECSEVGCDGPGPDHCNDCLHYYYKLKNNTRICVSSCPPGHYHADKKRCRKCAPNCESCFGSHGDQCMSCKYGYFLNEETNSCVTHCPDGSYQDTKKNLCRKCSENCKTCTEFHNCTECRDGLSLQGSRCSVSCEDGRYFNGQDCQPCHRFCATCAGAGADGCINCTEGYFMEDGRCVQSCSISYYFDHSSENGYKSCKKCDISCLTCNGPGFKNCTSCPSGYLLDLGMCQMGAICKDGEYVDEHGHCQTCEASCAKCQGPTQEDCTTCPMTRIFDDGRCVSNCPSWKFEFENQCHPCHHTCQRCQGSGPTHCTSCGADNYGREHFLYQGECGDSCPEGHYATEGNTCLPCPDNCELCHSVHVCTRCMKGYFIAPTNHTCQKLECGQGEVQDPDYEECVPCEEGCLGCSLDDPGTCTSCAMGYYRFDHHCYKTCPEKTYSEEVECKACDSNCGSCDQNGCYWCEEGFFLLGGSCVRKCGPGFYGDQEMGECESCHRACETCTGPGHDECSSCQEGLQLLRGMCVHATKTQEEGKFWNDILRKLQPCHSSCKTCNGSATLCTSCPKGAYLLAQACVSSCPQGTWPSVRSGSCENCTEACAICSGADLCKKCQMQPGHPLFLHEGRCYSKCPEGSYAEDGICERCSSPCRTCEGNATNCHSCEGGHVLHHGVCQENCPERHVAVKGVCKHCPEMCQDCIHEKTCKECTPEFFLHDDMCHQSCPRGFYADSRHCVPCHKDCLECSGPKADDCELCLESSWVLYDGLCLEECPAGTYYEKETKECRDCHKSCLTCSSSGTCTTCQKGLIMNPRGSCMANEKCSPSEYWDEDAPGCKPCHVKCFHCMGPAEDQCQTCPMNSLLLNTTCVKDCPEGYYADEDSNRCAHCHSSCRTCEGRHSRQCHSCRPGWFQLGKECLLQCREGYYADNSTGRCERCNRSCKGCQGPRPTDCLSCDRFFFLLRSKGECHRSCPDHYYVEQSTQTCERCHPTCDQCKGKGALNCLSCVWSYHLMGGICTSDCLVGEYRVGEGEKFNCEKCHESCMECKGPGAKNCTLCPANLVLHMDDSHCLHCCNTSDPPSAQECCDCQDTTDECILRTSKVRPATEHFKTALFITSSMMLVLLLGAAVVVWKKSRGRVQPAAKAGYEKLADPNKSYSSYKSSYRESTSFEEDQVIEYRDRDYDEDDDDDIVYMGQDGTVYRKFKYGLLDDDDIDELEYDDESYSYYQ

SEQ ID NO: 573 - protein, 969 aa, Homo sapiens
MPPRAPPAPGPRPPPRAAAATDTAAGAGGAGGAGGAGGPGFRPLAPRPWRWLLLLALPAACSAPPPRPVYTNHWAVQVLGGPAEADRVAAAHGYLNLGQIGNLEDYYHFYHSKTFKRSTLSSRGPHTFLRMDPQVKWLQQQEVKRRVKRQVRSDPQALYFNDPIWSNMWYLHCGDKNSRCRSEMNVQAAWKRGYTGKNVVVTILDDGIERNHPDLAPNYDSYASYDVNGNDYDPSPRYDASNENKHGTRCAGEVAASANNSYCIVGIAYNAKIGGIRMLDGDVTDVVEAKSLGIRPNYIDIYSASWGPDDDGKTVDGPGRLAKQAFEYGIKKGRQGLGSIFVWASGNGGREGDYCSCDGYTNSIYTISVSSATENGYKPWYLEECASTLATTYSSGAFYERKIVTTDLRQRCTDGHTGTSVSAPMVAGIIALALEANSQLTWRDVQHLLVKTSRPAHLKASDWKVNGAGHKVSHFYGFGLVDAEALVVEAKKWTAVPSQHMCVAASDKRPRSIPLVQVLRTTALTSACAEHSDQRVVYLEHVVVRTSISHPRRGDLQIYLVSPSGTKSQLLAKRLLDLSNEGFTNWEFMTVHCWGEKAEGQWTLEIQDLPSQVRNPEKQGKLKEWSLILYGTAEHPYHTFSAHQSRSRMLELSAPELEPPKAALSPSQVEVPEDEEDYTAQSTPGSANILQTSVCHPECGDKGCDGPNADQCLNCVHFSLGSVKTSRKCVSVCPLGYFGDTAARRCRRCHKGCETCSSRAATQCLSCRRGFYHHQEMNTCVTLCPAGFYADESQKNCLKCHPSCKKCVDEPEKCTVCKEGFSLARGSCIPDCEPGTYFDSELIRCGECHHTCGTCVGPGREECIHCAKNFHFHDWKCVPACGEGFYPEEMPGLPHKVCRRCDENCLSCAGSSRNCSRCKTGFTQLGTSCITNHTCSNADETFCEMVKSNRLCERKLFIQFCCRTCLLAG

SEQ ID NO: 574 - protein, 785 aa, Homo sapiens
MPKGRQKVPHLDAPLGLPTCLWLELAGLFLLVPWVMGLAGTGGPDGQGTGGPSWAVHLESLEGDGEEETLEQQADALAQAAGLVNAGRIGELQGHYLFVQPAGHRPALEVEAIRQQVEAVLAGHEAVRWHSEQRLLRRAKRSVHFNDPKYPQQWHLNNRRSPGRDINVTGVWERNVTGRGVTVVVVDDGVEHTIQDIAPNYSPEGSYDLNSNDPDPMPHPDVENGNHHGTRCAGEIAAVPNNSFCAVGVAYGSRIAGIRVLDGPLTDSMEAVAFNKHYQINDIYSCSWGPDDDGKTVDGPHQLGKAALQHGVIAGRQGFGSIFVVASGNGGQHNDNCNYDGYANSIYTVTIGAVDEEGRMPFYAEECASMLAVTFSGGDKMLRSIVTTDWDLQKGTGCTEGHTGTSAAAPLAAGMIALMLQVRPCLTWRDVQHIIVFTATRYEDRRAEWVTNEAGFSHSHQHGFGLLNAWRLVNAAKIWTSVPYLASYVSPVLKENKAIPQSPRSLEVLWNVSRMDLEMSGLKTLEHVAVTVSITHPRRGSLELKLFCPSGMMSLIGAPRSMDSDPNGFNDWTFSTVRCWGERARGTYRLVIRDVGDESFQVGILRQWQLTLYGSVWSAVDIRDRQRLLESAMSGKYLHDDFALPCPPGLKIPEEDGYTITPNTLKTLVLVGCFTVFWTVYYMLEVYLSQRNVASNQVCRSGPCHWPHRSRKAKEEGTELESVPLCSSKDPDEVETESRGPPTTSDLLAPDLLEQGDWSLSQNKSALDCPHQHLDVPHGKEEQIC

SEQ ID NO: 575 - protein, 1052 aa, Homo sapiens
MKLVNIWLLLLVVLLCGKKHLGDRLEKKSFEKAPCPGCSHLTLKVEFSSTVVEYEYIVAFNGYFTAKARNSFISSALKSSEVDNWRIIPRNNPSSDYPSDFEVIQIKEKQKAGLLTLEDHPNIKRVTPQRKVFRSLKYAESDPTVPCNETRWSQKWQSSRPLRRASLSLGSGFWHATGRHSSRRLLRAIPRQVAQTLQADVLWQMGYTGANVRVAVFDTGLSEKHPHFKNVKERTNWTNERTLDDGLGHGTFVAGVIASMRECQGFAPDAELHIFRVFTNNQVSYTSWFLDAFNYAILKKIDVLNLSIGGPDFMDHPFVDKVWELTANNVIMVSAIGNDGPLYGTLNNPADQMDVIGVGGIDFEDNIARFSSRGMTTWELPGGYGRMKPDIVTYGAGVRGSGVKGGCRALSGTSVASPVVAGAVTLLVSTVQKRELVNPASMKQALIASARRLPGVNMFEQGHGKLDLLRAYQILNSYKPQASLSPSYIDLTECPYMWPYCSQPIYYGGMPTVVNVTILNGMGVTGRIVDKPDWQPYLPQNGDNIEVAFSYSSVLWPWSGYLAISISVTKKAASWEGIAQGHVMITVASPAETESKNGAEQTSTVKLPIKVKIIPTPPRSKRVLWDQYHNLRYPPGYFPRDNLRMKNDPLDWNGDHIHTNFRDMYQHLRSMGYFVEVLGAPFTCFDASQYGTLLMVDSEEEYFPEEIAKLRRDVDNGLSLVIFSDWYNTSVMRKVKFYDENTRQWWMPDTGGANIPALNELLSVWNMGFSDGLYEGEFTLANHDMYYASGCSIAKFPEDGVVITQTFKDQGLEVLKQETAVVENVPILGLYQIPAEGGGRIVLYGDSNCLDDSHRQKDCFWLLDALLQYTSYGVTPPSLSHSGNRQRPPSGAGSVTPERMEGNHLHRYSKVLEAHLGDPKPRPLPACPRLSWAKPQPLNETAPSNLWKHQKLLSIDLDKVVLPNFRSNRPQVRPLSPGESGAWDIPGGIMPGRYNQEVGQTIPVFAFLGAMVVLAFFVVQINKAKSRPKRRKPRVKRPQLMQQVHPPKTPSV

SEQ ID NO: 576 - protein, 692 aa, Homo sapiens
MGTVSSRRSWWPLPLLLLLLLLLGPAGARAQEDEDGDYEELVLALRSEEDGLAEAPEHGTTATFHRCAKDPWRLPGTYVVVLKEETHLSQSERTARRLQAQAARRGYLTKILHVFHGLLPGFLVKMSGDLLELALKLPHVDYIEEDSSVFAQSIPWNLERITPPRYRADEYQPPDGGSLVEVYLLDTSIQSDHREIEGRVMVTDFENVPEEDGTRFHRQASKCDSHGTHLAGVVSGRDAGVAKGASMRSLRVLNCQGKGTVSGTLIGLEFIRKSQLVQPVGPLVVLLPLAGGYSRVLNAACQRLARAGVVLVTAAGNFRDDACLYSPASAPEVITVGATNAQDQPVTLGTLGTNFGRCVDLFAPGEDIIGASSDCSTCFVSQSGTSQAAAHVAGIAAMMLSAEPELTLAELRQRLIHFSAKDVINEAWFPEDQRVLTPNLVAALPPSTHGAGWQLFCRTVWSAHSGPTRMATAVARCAPDEELLSCSSFSRSGKRRGERMEAQGGKLVCRAHNAFGGEGVYAIARCCLLPQANCSVHTAPPAEASMGTRVHCHQQGHVLTGCSSHWEVEDLGTHKPPVLRPRGQPNQCVGHREASIHASCCHAPGLECKVKEHGIPAPQEQVTVACEEGWTLTGCSALPGTSHVLGAYAVDNTCVVRSRDVSTTGSTSEGAVTAVAICCRSRHLAQASQELQ

SEQ ID NO: 577 - protein, 519 aa, Homo sapiens
MIPVSLVVVVVGGWTVVYLTDLVLKSSVYFKHSYEDWLENNGLSISPFHIRWQTAVFNRAFYSWGRRKARMLYQWFNFGMVFGVIAMFSSFFLLGKTLMQTLAQMMADSPSSYSSSSSSSSSSSSSSSSSSSSSSSLHNEQVLQVVVPGINLPVNQLTYFFTAVLISGVVHEIGHGIAAIREQVRFNGFGIFLFIIYPGAFVDLFTTHLQLISPVQQLRIFCAGIWHNFVLALLGILALVLLPVILLPFYYTGVGVLITEVAEDSPAIGPRGLFVGDLVTHLQDCPVTNVQDWNECLDTIAYEPQIGYCISASTLQQLSFPVRAYKRLDGSTECCNNHSLTDVCFSYRNNFNKRLHTCLPARKAVEATQVCRTNKDCKKSSSSSFCIIPSLETHTRLIKVKHPPQIDMLYVGHPLHLHYTVSITSFIPRFNFLSIDLPVVVETFVKYLISLSGALAIVNAVPCFALDGQWILNSFLDATLTSVIGDNDVKDLIGFFILLGGSVLLAANVTLGLWMVTAR

SEQ ID NO: 578 - protein, 476 aa, Homo sapiens
MAGRGGSALLALCGALAACGWLLGAEAQEPGAPAAGMRRRRRLQQEDGISFEYHRYPELREALVSVWLQCTAISRIYTVGRSFEGRELLVIELSDNPGVHEPGEPEFKYIGNMHGNEAVGRELLIFLAQYLCNEYQKGNETIVNLIHSTRIHIMPSLNPDGFEKAASQPGELKDWFVGRSNAQGIDLNRNFPDLDRIVYVNEKEGGPNNHLLKNMKKIVDQNTKLAPETKAVIHWIMDIPFVLSANLHGGDLVANYPYDETRSGSAHEYSSSPDDAIFQSLARAYSSFNPAMSDPNRPPCRKNDDDSSFVDGTTNGGAWYSVPGGMQDFNYLSSNCFEITVELSCEKFPPEETLKTYWEDNKNSLISYLEQIHRGVKGFVRDLQGNPIANATISVEGIDHDVTSAKDGDYWRLLIPGNYKLTASAPGYLAITKKVAVPYSPAAGVDFELESFSERKEEEKEELMEWWKMMSETLNF

SEQ ID NO: 579 - protein, 431 aa, Homo sapiens
MHVRSLRAAAPHSFVALWAPLFLLRSALADFSLDNEVHSSFIHRRLRSQERREMQREILSILGLPHRPRPHLQGKHNSAPMFMLDLYNAMAVEEGGGPGGQGFSYPYKAVFSTQGPPLASLQDSHFLTDADMVMSFVNLVEHDKEFFHPRYHHREFRFDLSKIPEGEAVTAAEFRIYKDYIRERFDNETFRISVYQVLQEHLGRESDLFLLDSRTLWASEEGWLVFDITATSNHWVVNPRHNLGLQLSVETLDGQSINPKLAGLIGRHGPQNKQPFMVAFFKATEVHFRSIRSTGSKQRSQNRSKTPKNQEALRMANVAENSSSDQRQACKKHELYVSFRDLGWQDWIIAPEGYAANYCEGECAFPLNSHMNATNHAIVQTLVHFINPETVPKPCCAPTQLNAISVLYFDDSSNVILKKYRNMVVEACGCH

SEQ ID NO: 580 - protein, 431 aa, Homo sapiens
MHVRSLRAAAPHSFVALWAPLFLLRSALADFSLDNEVHSSFIHRRLRSQERREMQREILSILGLPHRPRPHLQGKHNSAPMFMLDLYNAMAVEEGGGPGGQGFSYPYKAVFSTQGPPLASLQDSHFLTDADMVMSFVNLVEHDKEFFHPRYHHREFRFDLSKIPEGEAVTAAEFRIYKDYIRERFDNETFRISVYQVLQEHLGRESDLFLLDSRTLWASEEGWLVFDITATSNHWVVNPRHNLGLQLSVETLDGQSINPKLAGLIGRHGPQNKQPFMVAFFKATEVHFRSIRSTGSKQRSQNRSKTPKNQEALRMANVAENSSSDQRQACSKHELYVSFRDLGWQDWIIAPEGYAAYYCEGECAFPLNSYMNATNHAIVQTLVHFINPETVPKPCCAPTQLNAISVLYFDDDSNVILKKYRNMVVEACGCH

SEQ ID NO: 581 - protein, 431 aa, Homo sapiens
MHVRSLRAAAPHSFVALWAPLFLLRSALADFSLDNEVHSSFIHRRLRSQERREMQREILSILGLPHRPRPHLQGKHNSAPMFMLDLYNAMAVEEGGGPGGQGFSYPYKAVFSTQGPPLASLQDSHFLTDADMVMSFVNLVEHDKEFFHPRYHHREFRFDLSKIPEGEAVTAAEFRIYKDYIRERFDNETFRISVYQVLQEHLGRESDLFLLDSRTLWASEEGWLVFDITATSNHWVVNPRHNLGLQLSVETLDGQSINPKLAGLIGRHGPQNKQPFMVAFFKATEVHFRSIRSTGSKQRSQNRSKTPKNQEALRMANVAENSSSDQRQACSKHELYVSFRDLGWQDWIIAPEGYAAYYCEGECAFPLNSYMNATNHAIVQTLVHSINPETVPKPCCAPTQLNAISVLYFDDDSNVILKKYRNMVVRACGCH

SEQ ID NO: 582 - DNA, 1314 bp, Artificial sequence
  Synthetic sequence
gtaagtatccgcgccgggaacagccgcgggccgcacgccgcgggccgcacgccgcacgcctgcgcagggaggcgccgcgcacgccggggtcgctccgggtacgcgcgctggactagctcaccccgctccttctcagggcggcccggcggaagcggccttgcaactcccttctctggttctcccggttgcatttacactggcttctgctttccgaaggaaaaggggacattttgtcctgcggtgcgactgcgggtcaaggcacgggcgaaggcagggcaggctggtggaggggaccggttccgaggggtgtgcggctgtctccatgcttgtcacttctctgcgataacttgtttcagtaatattaatagatggtatctgctagtatatacatacacataatgtgtgtgtctgtgtgtatctgtatatagcgtgtgtgttgtgtgtgtgtgtttgcgcgcacgggcgcgcgcacacctaatattttcaaggctggatttttttgaacgaaatgctttcctggaacgaggtgaaactttcagagctgcagaatagctagagcagcaggggccctggcttttggaaactgacccgacctttattccagattctgccccactccgcagagctgtgtgaccttgggggattcccctaacctctctgagacgtggctttgttttctgtagggagaagataaaggtgacgcccattttgcggacctggtgtgaggattaaatgggaataacatagataaagtcttcagaacttcaaattagttcccctttcttcctttggggggtacaaagaaatatctgacccagttacgccacggcttgaaaggaggaaacccaaagaatggctgtggggatgaggaagattcctcaaggggaggacatggtatttaatgagggtcttgaagatgccaaggaagtggtagagggtgtttcacgaggagggaaccgtctgggcaaaggccaggaaggcggaaggggatcccttcagagtggctggtacgccgcatgtattaggggagatgaaagaggcaggccacgtccaagccatatttgtgttgctctccggagtttgtactttaggcttgaacttcccacacgtgttatttggcccacattgtgtttgaagaaactttgggattggttgccagtgcttaaaagttaggacttagaaaatggatttcctggcaggacgcggtggctcatgcccataatctcagcactttgggaggcctaggaaggtggatcacctgaggtccggagttcaagactaacctggccaacatggtgaaacccagtatctact

SEQ ID NO: 583 - DNA, 9081 bp, Artificial sequence
  Synthetic sequence
aataaagaaaagttagccgggcgtggtgtcgcgcgcctgtaatcccagctactccagaggctgcggcaggagaatcgcttgagcccgggaggcagaggttgcattaagccaagatcgcccaatgcactccggcctgggcgacagagcaagactccgtctcaaaaaataataataataaataaaaataaaaaataaaatggatttcccagcatctctggaaaaataggcaagtgtggccatgatggtccttagatctcctctaggaaagcagacatttattacttggcttctgtgcactatctgagctgccacgtattgggcttccacccctgcctgtgtggacagcatgggttgtcagcagagttgtgttttgttttgtttttttgagacagagtttccctcttgttgcccaggctggagtgcagtggctcagtctcagctcactgcaacctctgcctcctgggttcaagtgattctcctgcctcagcctcccgagtagctgggattatcggctaattttgtatttttagtagagacagatttctccatgttggtcaggctggtctcgaactcccaacctcaggtgatccgcccacctcgccctcccaaagtgctggaattacaggcgtgagccaccgcgtctggccatcagcagagtttttaatttaggagaatgacaagaggtggtacagttttttagatggtacctggtggctgttaagggctattgactgacaaacacacccaacttggcgctgccgcccaggaggtggacactgggtttctggatagatggttagcaacctctgtcaccagctgggcctctttttttctatactgaattaatcacatttgtttaacctgtctgttccatagttcccttgcacatcttgggtatttgaggagttgggtgggtggcagtggcaactggggccaccatcctgtttaattattttaaagccctgactgtcctggattgaccctaagctccccctggtctccaaaattcatcagaaactgagttcacttgaaggcctcttccccacccttttctccaccccttgcatctacttctaaagcagctgttcaacagaaacagaatgggagccacacacataattctacattttctagttaaaaagaaaaaaaaatcattttcaacaatatatttattcaacctagtacatacaaaatattatcattccaacatgtaatcagtattttaaaaatcagtaatgagaccaggcacggtggctcacgactgtaatcccaggactttgggaggccgaggcgagtggatcatctgagatcaggagttcaagaccagcctggccaacatggtgaaaccccatctctactaaaaactagctcagcatggtggtgggtgcctgtagtcccagctactcgggaggctgaggcatgagaatcacttgagcccaggaggcagaggttgcagtgagccaagattttgggggattctgtgacatacaaaaaaaatcagtaataagatatcttgcatactcttttcgtactcatatacttccagcatatctcaattcacaatttctaagtaaatgctctatctgtatttacttttataaaattcacaattaaaaatgaaggttcacatagtcaagttgttccaaacacacttaaatgtctcctaggctgggtgtggttgctcacacctgtaatcccagcactttgggaggctgagatgggcggatcacctgaggtcaggagtttgagaccagcctggccaacatggtgaaaccccgtctctactaaaaatacaaaaattagctggatgtggtggcactcacctgtaatcccagctactcaggaggctgaggcaggataattgcttgaacccgggaggtggtggaggttgcagtgagccgagatcgcaccactgccttccaacctgggcgacagagcgagactccgtctcaaaaaaaaaaaaaaggctcctaataactttattactttattatcacctcaaataattaaaattaaatgaagttgaaaatccaggtcctcagtcccattagccacatttctagtgctcagtagccacgggggctggtgaccaccacatgggacagcatatttagtacctgatcattggttctcagatctggctactcagcagaaccaagaatccacagaaacggcttttaaaagcacagccccacagcccccagccccagccttacctacctggaggctgggaaggactctgattccacgaggcagcctatgttttttgatggagggatgtgacaggggctgcatctttaacgtttcctcttaaatactggagacagcttcgaggaggagataactggatgtgtcttagtccatttgatggagggatgtgacggggctgcgtctttaacgtttcctcttaaataccggagacagcttcgagaaggagataactggatgtttcttagtccattttctgttgcttgtgacagaatacctgaaactgggcaatttatatggtaaaaaattttcttcttactgctctggaggctgagaagtccaaagtcaagtcccttcttgctggtggggactttgcagagtattgaggcggcaccgggcgtcatatggtaaggggctgagtgtgctacctcaggtgtctttttcttttcttataaagcctaactagtttcactcccatgataacccattaatctatgaatggattaatccattattgagggaagaaccttcatgacccagtcaccgcttaaaggccccacctctcaatactgccacatcgggaattaagtttcaacatgagtttcggaggtgacaaacattcaaaccatagcatgctgtctcttaaatgactcaataagctcctgtggcatccacttctgcatgccttgggcagcttttagacatctgtccattttcctagagggacaagaccaccacctgtgatcctatgaccttttggctttaggcctaacaagcaggttataccctcactcactttcaaatcatttttattgtcttgcagacaatttacacaagtttacacatagaaaaggatatgtaaatatttatacgctgccgggcgcggtggctcacgcctgtaatcccagcactttgggaggccgaggcaggtggatcacgagttcaggagatggagaccatcctggctaatacgatgaaaccccatctctactaaaaatacaaaaaattagccgggcgtggtgacgggtgcctgtagtccccactactcgggacgctgaggcaggagaatggcgtgaacccgggaggcagagcttgcagtgatccgagatcgtgccactgcactccagcctgggtgacagagcgagactgcatctcaaagaaaaaaataaataaataaataaatatttatactgcttataaactaataataaatgctatggtctgcatgtttgtgtcaccccaccattcatatgttaaaacctaatcaccaaagtgatattaggaggtggggcccttgggaggtgatgaggtatgagggtggagcccatatgattgggattagtgcccttctaaaatagcccaacggagcccagtgacaaggcatcatctatgaaccaggaaactggccctcaccagacaccaaagctgttggtgcattgatcttggatttcccaccctccaggactctaagaaacacatttctattgtttataagccacccagtggctggtattttgttataacatcccagactaagacaaataacaaatacttgtatccctgacaccaggttaagagatagaatttgtttgttcctctggaggcccttgtcttcaccccatcactgccctgtcctccctggaggaatctgccagcccgaattctgttcatcgtaccctccttttcttagagtttgacctcctctgtatctcccccaatccatgtattgcttatatacaaggtattctgctgtatctgttctgctatggcttgccccttttgttcaacactgtttttgtgcgtcatctgcattgatgcatgcagttgtcctttatttgttctcactgctggatagtatctggttgggtaaatatatcacactgtaaatcacactatccaggttcctttaggtgacatttggttgattgcagtgttctgttgttacgatggtgctgctgtgactgttcttgtgcatggacagaagttcctttcaggtgaatttctcagaatggaattgctgggcaaaggggcagccaataatcaactcatttgatgccaaaagtggtggtgccagttcatcctcccctgcgaggtatgggtcctgattcactcttcaagtgctgtggtttgacagggccgggggtgacaaggggacacctgggaaggaaagctgggctccctgctggccatccaggccagtccttaccagggggtaggcaatgattgggtcaagtggttcctgaccactgggcctgagacttcaggcccagaaactatctaatatttcctcaaatgcatcccatgagcaggcactgtgtgagtgagcacacacatctgaagcctcaagctaggcaagcctaccatgacttgtggtccaagggctcacgggtgacctggagttagagggagacatggctgccaggtggctttagaaagaacactcatcatggccaggtgcggtggcttacgcctgtaatcccagcactttgggaggccaaggtgggtggatcatgaggtcaggagtgagaccagcctgaccaacatgctgaaacctgtctctcctaaaaacacaaaaattagctgggcatggaggtgcacgcctgtaatcccagctactcaggaggctgaggcaggagaatcacttgaacccgggaggcggaggttgcaataagcctagattgtgccactgcattccagcctgggcaacagagcaagactccgtctcagaaaaaaaaaaaaaaaggaagaacactcatcctatgaccttgacctccaagctttgcctccctcaagcagaacagaatggagcctcccttaggcagaggcggaagtttgcctctcacctagttctccattcttttgttcagagcctgaataccctcaggctctgtacttggggtatttctgttctcttgttttatgctcacggttgtgaggtttgttgtgagtaccacgatcccttccttcagaggagtaaactgaggttccaaaaggtttagcagttgcccgaggaatattaaattggcaaaagcaggtagaatataaagcaaggagtatttggcaacggttcttttttatgattaaaaacagccgaagaaagacttctacttgtgcctttgaaggagtaactgcatttgaccttcccaccagtaacaaccatcaaatctctattaaattaaacacacacacacacaaacaaaaacagctattgtgaaggtatcagcgactaagacaactaaggtttgaggggccaggatcctggagagatggaaacttccctgaggtgagccccacattctcagacacttttccttggatgttttgagcactgctttaattcctgggaaaacaattccttccactgtgcacagactctggggccagacagcttgggttcaatcccagctctgccacttaatgtctgtgtatctgtgtaggcaagttaccctttggtgcgtcagtttcctcatctgtaaaacacaactatagttgatcctcattcgttaagagtctgtacttgttaatttgctcacttgctaaaatttgttaccccaaaatcagtacccctagccttttggggtcgtttcaaagatgtgtgcagagcggcaaaaaaatgtgagctcctccaggctcatgttcccagccaaggtccaacaaagtgctgccctgccttcttatttcagctgtcatagtgtaaactgtgtccttttcacagtctgattagtgccatgtttttcagatttttatgcttttttcttggttatttctctgttaaaattgtctccaagtgtagtgcaaagtttagcacgaggaggctgtgatgttccttacagagaaaatgcatgtgttagagaagctttgtcaggcatgagttaaggtgctgttgtcctgagatcaattaatttgttgttgttgttgtttgagacagggtctccctctgttgcccaggctgctggagtgcaatggtgtaatcatagctcactgcagcctctacctctctggctcaagcaatcctcccacctcggcctcctgagtagctgggactacaggtacaccccaccacacccagataatgtttttgatatttttttaggtggaattttgctcatcacccaggctggagtgcaatggtgcgatcctggctcactgcaacctccacctcccggattcaagcaattcttctgcctcagcctcctgagtagcacagattacaggcacatgtcatcacgccttgctaatttttgtgtttttagtagaggcggggtttcaccatgttggccaggctagtcttgaactcctgacctcaggtgatccacccgcctccgcctcccaaactgcagagattataggcacgaaccacaatgcccggcctcatgttttttatttttcaagttgaaatgaggtctctctatgttgcccaggttggtctcaaactcttgagctcaagtaatcctcccaccttggcctcccaaagtgcggggattacaggtgtgagctaccatgcccagccaagatcagtgttaatgaatcaactatatatattacataaggtgtctttaaacagaaataaggttatatattgatcgattggtaacaatgttgtgaccagcagcttacagggtacctagccttgtatttctcctataaataatttgctcgttgagtgtttgtggcaactttgtagcacataactaccaagaataaggactgtaataagagtacgtccctcacaggattgtaatgaagactgagtccatttacataaaggctgagagcagtgtcaagcagatggagaacactgtagaatgtgcgatagctctaacagtggttatcatggctgccctctcacttcttcagagacatgtgtttctaaggtctgcactctgccccaccctccccatccactgtcccccagcccgtttcctcctccacttacttcccagccctgtgccttctgccttctcttttctgagtttgctaagggcactgctggctcaagagcagtaactaacagtctctcgcctcttctctccatggcaaccagtgacctttggagaatgtaaaccttatcaccaatctcttaaagcccttcggtgccttcccaggatgacgtccagctgaggtccttggcaagacccagggcgccccctcctcgctccatcacctcccctgtcacctcccctgcatctccctactccagctgcaccactcttgtgccccagtggctcttgtctgattatttccttcatctccccagctggtcagcagagctggtggtaatcaactcagaccctgtcacctggatgtccagcagttagggactaaaaaaaatcaacaggtcacattctgtcctgcagatcatgataataagatctgtcagacagcagtcagcagtcagagccaaatcttctggacttcagcaggattctgcctcttgctatttcctgttgcctctcttagtgaccttttaagagcattgtggatgcctcccagcctcctgctaaccaccctgtaacctgaacagcctgcagcagccctgcccagtagaacttcctgatgtgatggaaatgctgtgtctgcaccactagccacatgtggccacaggattctcgaaactggtggtgcagttgaggagctgactttatattttatctcattaaatttaaatgtaaatagctacgtgtggcttgttggctagcctattggaaaacacgggcttagagagacacagggagaatcactgtaatgcactaaaagaaggtaaaaaaaaaaaaatcctaagaaatattcctaaaatactttaatatagggctgggtgcggtggctcacatccagcattttgggaagctgaggagggcagatcacttgaggccaggagttcaagaccagcctggccaacatggtgaaaccccgtctctactaaaaatacaaaaaatcgggtgcggtggcgggtgcctgtaatcccagctacgcgggaggctgaggcacgagaatcactcgaacccgggaggcgggggttgcagtgagccgagatcgtgccactgcactccagcctgggcgacagagcgagacttcatctcaaaaacaaaaaacaaaaaccaaaaaaaaaaacttcagcatgattatttaaccaaaatgcaggttagttgttcaccggatgcagagtccaattaacaagagcaaggcctggtaccaaaaaaagtgaatttactccgaaactagcttgggtgaggggtacaaagcatcctgcctttctttaaaagtgctgcttccccttggaagtagaaagtggacacttttataaggtaaggggggaagtgtgcaagggcaagtgggggggtccctctgctagttccgtgcatactctacaggacagttgacttggcaccttcctggttagtaataagctgtagcagtggccaagtgggcatgctttcagtatgccctcccagtgaatgaaagtcctgaggcaacccccaagggtggaagtgccaggccaccacccactggaggtgaaagttccgtgatgggtttgctttggtctgcgaatctactgtcatgtggagagatctgtgctctggaagagcatacagttagaaaagcttgccctgaagggaatgtatggtgaaggggaggtgaaaggttatatttgcatttctgaagggctaagtaggaaaccgggaaccaggggagaggagaagagaagagaggataattttttttaagaaaagcaacatattccctttttcttagaaaaaatggagcactcggttacaggcactcgaatgtagaagtagcaatatataaattatgcattaatgggttataattcactgaaaaatagtaacgtacttcttaactttggctttcaga

SEQ ID NO: 584 - DNA, 646 bp, Artificial sequence
  Synthetic sequence
atgccgtcttctgtctcgtggggcatcctcctgctggcaggcctgtgctgcctggtccctgtctccctggctgaggatccccagggagatgctgcccagaagacagatacatcccaccatgatcaggatcacccaaccttcaacaagatcacccccaacctggctgagttcgccttcagcctataccgccagctggcacaccagtccaacagcaccaatatcttcttctccccagtgagcatcgctacagcctttgcaatgctctccctggggaccaaggctgacactcacgatgaaatcctggagggcctgaatttcaacctcacggagattccggaggctcagatccatgaaggcttccaggaactcctccgtaccctcaaccagccagacagccagctccagctgaccaccggcaatggcctgttcctcagcgagggcctgaagctagtggataagtttttggaggatgttaaaaagttgtaccactcagaagccttcactgtcaacttcggggacaccgaagaggccaagaaacagatcaacgattacgtggagaagggtactcaagggaaaattgtggatttggtcaaggagcttgacagagacacagtttttgctctggtgaattacatcttctttaaag

SEQ ID NO: 585 - DNA, 815 bp, Artificial sequence
  Synthetic sequence
gagagagccctggaggcagacgtggagtgacgatgctcttccctgttctgagttgtgggtgcacctgagcagggggagaggcgcttgtcaggaagatggacagaggggagccagccccatcagccaaagccttgaggaggagcaaggcctatgtgacagggagggagaggatgtgcagggccagggccgtccagggggagtgagcgcttcctgggaggtgtccacgtgagccttgctcgaggcctgggatcagccttacaacgtgtctctgcttctctcccctccaggccgtgcataaggctgtgctgaccatcgacgagaaagggactgaagctgctggggccatgtttttagaggccatacccatgtctatcccccccgaggtcaagttcaacaaaccctttgtcttcttaatgattgaacaaaataccaagtctcccctcttcatgggaaaagtggtgaatcccacccaaaaataactgcctctcgctcctcaacccctcccctccatccctggccccctccctggatgacattaaagaagggttgagctggtccctgcctgcatgtgactgtaaatccctcccatgttttctctgagtctccctttgcctgctgaggctgtatgtgggctccaggtaacagtgctgtcttcgggccccctgaactgtgttcatggagcatctggctgggtaggcacatgctgggcttgaatccaggggggactgaatcctcagcttacggacctgggcccatctgtttctggagggctccagtcttccttgtcctgtcttggagtccccaagaaggaatca

SEQ ID NO: 586 - DNA, 20 bp, Artificial sequence
  Synthetic sequence
tgaccatcgacgagaaaggg

SEQ ID NO: 587 - protein, 65 aa, Artificial sequence
  Synthetic sequence
SIVAQLSRPDPALAALTNDHLVALACLGGRPALDAVKKGLPHAPALIKRTNRRIPERTSHRVAGS

SEQ ID NO: 588 - protein, 336 aa, Artificial sequence
  Synthetic sequence
SLGTGNRCVKGDSLSLKGETVNDCHAEIISRRGFIRFLYSELMKYNSQTAKDSIFEPAKGGEKLQIKKTVSFHLYISTAPCGDGALFDKSCSDRAMESTESRHYPVFENPKQGKLRTKVENGEGTIPVESSDIVPTWDGIRLGERLRTMSCSDKILRWNVLGLQGALLTHFLQPIYLKSVTLGYLFSQGHLTRAICCRVTRDGSAFEDGLRHPFIVNHPKVGRVSIYDSKRQSGKTKETSVNWCLADGYDLEILDGTRGTVDGPRNELSRVSKKNIFLLFKKLCSFRYRRDLLRLSYGEAKKAARDYETAKNYFKKGLKDMGYGNWISKPQEEKNF

SEQ ID NO: 589 - protein, 368 aa, Artificial sequence
  Synthetic sequence
SVSTGTKCINGEYMSDRGLALNDCHAEIISRRSLLRFLYTQLELYLNNKDDQKRSIFQKSERGGFRLKENVQFHLYISTSPCGDARIFSPHEPILEGSRSYTQAGVQWCNHGSLQPRPPGLLSDPSTSTFQGAGTTEPADRHPNRKARGQLRTKIESGEGTIPVRSNASIQTWDGVLQGERLLTMSCSDKIARWNVVGIQGSLLSIFVEPIYFSSIILGSLYHGDHLSRAMYQRISNIEDLPPLYTLNKPLLSGISNAEARQPGKAPNFSVNWTVGDSAIEVINATTGKDELGRASRLCKHALYCRWMRVHGKVPSHLLRSKITKPNVYHESKLAAKEYQAAKARLFTAFIKAGLGAWVEKPTEQDQF

SEQ ID NO: 590 - protein, 326 aa, Artificial sequence
  Synthetic sequence
AIGTGEYNYSQDIKPDGRVLHDTHAVVTARRSLLRYFYRQLLLFYSKNPAMMEKSIFCTEPTSNLLTLKQNINICLYMNQLPKGSAQIKSQLRLNPHSISAFEANEELCLHVAVEGKIYLTVYCPKDGVNRISSMSSSDKLTRWEVLGVQGALLSHFIQPVYISSILIGDGNCSDTRGLEIAIKQRVDDALTSKLPMFYLVNRPHISLVPSAYPLQMNLEYKFLSLNWAQGDVSLEIVDGLSGKITESSPFKSGMSMASRLCKAAMLSRFNLLAKEAKKELLEAGTYHAAKCMSASYQEAKCKLKSYLQQHGYGSWIVKSPCIEQF

SEQ ID NO: 591 - protein, 322 aa, Artificial sequence
  Synthetic sequence
ALGTGSSCCAGWLEFSGQQLHDCHGLVIARRALLRFLFRQLLLATQGGPKGKEQSVLAPQPGPGPPFTLKPRVFLHLYISNTPKGAARDIYLPPTSEGGLPHSPPMRLQAHVLGQLKPVCYVAPSLCDTHVGCLSASDKLARWAVLGLGGALLAHLVSPLYSTSLILADSCHDPPTLSRAIHTRPCLDSVLGPCLPPPYVRTALHLFAGPPVAPSEPTPDTCRGLSLNWSLGDPGIEVVDVATGRVKANAALGPPSRLCKASFLRAFHQAARAVGKPYLLALKTYEAAKAGPYQEARRQLSLLLDQQGLGAWPSKPLVGKFR

SEQ ID NO: 592 - protein, 125 aa, Artificial sequence
  Synthetic sequence
GDPTLRRRIEPWEFDVFYDPRELRKEACLLYEIKWGMSRKIWRSSGKNTTNHVEVNFIKKFTSERDFHPSMSCSITWFLSWSPCWECSQAIREFLSRHPGVTLVIYVARLFWHMDQQNRQGLRDL

SEQ ID NO: 593 - protein, 106 aa, Artificial sequence
  Synthetic sequence
GRNKTFLCYVVEAQGKGGQVQASRGYLEDEHAAAHAEEAFFNTILPAFDPALRYNVTWYVSSSPCAACADRIIKTLSKTKNLRLLILVGRLFMWEEPEIQAALKKL

SEQ ID NO: 594 - DNA, 31 bp, Artificial Sequence
  Synthetic sequence
tcctctgtctccctgtctctgtctctctctc

SEQ ID NO: 595 - DNA, 21 bp, Artificial Sequence
  Synthetic sequence
ggacttgggccaggggaggag

SEQ ID NO: 596 - protein, 17 aa, Gaussia princeps
MGVKVLFALICIAVAEA

SEQ ID NO: 597 - protein, 29 aa, Homo Sapiens
MHVRSLRAAAPHSFVALWAPLFLLRSALA

SEQ ID NO: 598 - protein, 18 aa, Homo Sapiens
MAFLWLLSCWALLGTTFG

SEQ ID NO: 599 - protein, 16 aa, Homo Sapiens
MLGITVLAALLACASS

SEQ ID NO: 600 - protein, 27 aa, Homo Sapiens
MGVHECPAWLWLLLSLLSLPLGLPVLG

SEQ ID NO: 601 - protein, 24 aa, Homo Sapiens
MRSGCVVVHVWILAGLWLAVAGRP

SEQ ID NO: 602 - protein, 28 aa, Homo Sapiens
MDSDETGFEHSGLWVSVLAGLLLGACQA

SEQ ID NO: 603 - protein, 24 aa, Homo Sapiens
MLGARLRLWVCALCSVCSMSVLRA

SEQ ID NO: 604 - protein, 20 aa, Homo Sapiens
MYRMQLLSCIALSLALVTNS

SEQ ID NO: 605 - protein, 33 aa, Homo Sapiens
MAALQKSVSSFLMGTLATSCLLLLALLVQGGAA

SEQ ID NO: 606 - protein, 29 aa, Homo Sapiens
MNSFSTSAFGPVAFSLGLLLVLPAAFPAP

SEQ ID NO: 607 - protein, 23 aa, Homo Sapiens
MALTFALLVALLVLSCKSSCSVG

SEQ ID NO: 608 - protein, 21 aa, Homo Sapiens
MTNKCLLQIALLLCFSTTALS

SEQ ID NO: 609 - protein, 23 aa, Homo Sapiens
MKYTSYILAFQLCIVLGSLGCYC

SEQ ID NO: 610 - protein, 15 aa, Homo Sapiens
MNPLLILTFVAAALA

SEQ ID NO: 611 - DNA, 20 bp, Artificial Sequence
  Synthetic sequence
taaggctgtgctgaccatcg

SEQ ID NO: 612 - DNA, 20 bp, Artificial Sequence
  Synthetic sequence
taaaaacatggccccagcag

SEQ ID NO: 613 - DNA, 20 bp, Artificial Sequence
  Synthetic sequence
tctaaaaacatggccccagc

SEQ ID NO: 614 - DNA, 81 bp, Artificial Sequence
  Synthetic sequence
cccctccaggccgtgcataaggctgtgctgaccatcgacgtcaaagggactgaagctgctggggccatgtttttagaggcc

SEQ ID NO: 615 - DNA, 20 bp, Artificial Sequence
  Synthetic sequence
tgcctggtccctgtctccct

SEQ ID NO: 616 - DNA, 20 bp, Artificial Sequence
  Synthetic sequence
tgtcttctgggcagcatctc

SEQ ID NO: 617 - DNA, 81 bp, Artificial Sequence
  Synthetic sequence
cccctccaggccgtgcataaggctgtgctgaccatcgacgagaaagggactgaagctgctggggccatgtttttagaggcc

SEQ ID NO: 618 - DNA, 20 bp, Artificial Sequence
  Synthetic sequence
tcccacacgtgttatttggc

SEQ ID NO: 619 - DNA, 20 bp, Artificial Sequence
  Synthetic sequence
tggcaaccaatcccaaagtt

SEQ ID NO: 620 - DNA, 20 bp, Artificial Sequence
  Synthetic sequence
taataaataaaaataaaaaa

SEQ ID NO: 621 - DNA, 20 bp, Artificial Sequence
  Synthetic sequence
ttgcctatttttccagagat

SEQ ID NO: 622 - DNA, 20 bp, Artificial Sequence
  Synthetic sequence
tattcccgggctcccaggca

SEQ ID NO: 623 - DNA, 20 bp, Artificial Sequence
  Synthetic sequence
tggtgcatctgactcctgag

SEQ ID NO: 624 - DNA, 20 bp, Artificial Sequence
  Synthetic sequence
tcaccttgccccacagggca

SEQ ID NO: 625 - DNA, 20 bp, Artificial Sequence
  Synthetic sequence
tccaggcatgcagatcccac

SEQ ID NO: 626 - DNA, 20 bp, Artificial Sequence
  Synthetic sequence
ttgtagcaccgcccagacga

SEQ ID NO: 627 - DNA, 25 bp, Artificial Sequence
  Synthetic sequence
gccaaggacaggtacggctgtcatc

SEQ ID NO: 628 - DNA, 28 bp, Artificial Sequence
  Synthetic sequence
cttgccatgagccttcaccttagggttg

SEQ ID NO: 629 - protein, 18 aa, Artificial Sequence
  Synthetic sequence
  misc_feature (12)..(12): Xaa can be any naturally occurring amino acid
LTPVQVVAIAWXYZGHGG

SEQ ID NO: 630 - protein, 19 aa, Artificial Sequence
  Synthetic sequence
GGKQALETVQRLLPVLCQD

SEQ ID NO: 631 - protein, 19 aa, Artificial Sequence
  Synthetic sequence
GGKQALETVQRLLPVLCQA

SEQ ID NO: 632 - protein, 196 aa, Homo sapiens; identical to SEQ ID NO: 53

SEQ ID NO: 633 - DNA, 555 bp, Homo sapiens
atgaagagcgtcttgctgctgaccacgctcctcgtgcctgcacacctggtggccgcctggagcaataattatgcggtggactgccctcaacactgtgacagcagtgagtgcaaaagcagcccgcgctgcaagaggacagtgctcgacgactgtggctgctgccgagtgtgcgctgcagggcggggagaaacttgctaccgcacagtctcaggcatggatggcatgaagtgtggcccggggctgaggtgtcagccttctaatggggaggatccttttggtgaagagtttggtatctgcaaagactgtccctacggcaccttcgggatggattgcagagagacctgcaactgccagtcaggcatctgtgacagggggacgggaaaatgcctgaaattccccttcttccaatattcagtaaccaagtcttccaacagatttgtttctctcacggagcatgacatggcatctggagatggcaatattgtgagagaagaagttgtgaaagagaatgctgccgggtctcccgtaatgaggaaatggttaaatccacgctga

SEQ ID NO: 634 - protein, 184 aa, Homo sapiens
MKSVLLLTTLLVPAHLVAAWSNNYAVDCPQHCDSSECKSSPRCKRTVLDDCGCCRVCAAGRGETCYRTVSGMDGMKCGPGLRCQPSNGEDPFGEEFGICKDCPYGTFGMDCRETCNCQSGICDRGTGKCLKFPFFQYSVTKSSNRFVSLTEHDMASGDGNIVREEVVKENAAGSPVMRKWLNPR

SEQ ID NO: 635 - DNA, 405 bp, Homo sapiens
atgaagagcgtcttgctgctgaccacgctcctcgtgcctgcacacctggtggccgcctggagcaataattatgcggtggactgccctcaacactgtgacagcagtgagtgcaaaagcagcccgcgctgcaagaggacagtgctcgacgactgtggctgctgccgagtgtgcgctgcagggcggggagaaacttgctaccgcacagtctcaggcatggatggcatgaagtgtggcccggggctgaggtgtcagccttctaatggggaggatccttttggtgaagagtttggtatctgcaaagagcatgacatggcatctggagatggcaatattgtgagagaagaagttgtgaaagagaatgctgccgggtctcccgtaatgaggaaatggttaaatccacgctga

SEQ ID NO: 636 - protein, 134 aa, Homo sapiens
MKSVLLLTTLLVPAHLVAAWSNNYAVDCPQHCDSSECKSSPRCKRTVLDDCGCCRVCAAGRGETCYRTVSGMDGMKCGPGLRCQPSNGEDPFGEEFGICKEHDMASGDGNIVREEVVKENAAGSPVMRKWLNPR

SEQ ID NO: 637 - DNA, 444 bp, Homo sapiens
atggcttctcatcgtctgctcctcctctgccttgctggactggtatttgtgtctgaggctggccctacgggcaccggtgaatccaagtgtcctctgatggtcaaagttctagatgctgtccgaggcagtcctgccatcaatgtggccgtgcatgtgttcagaaaggctgctgatgacacctgggagccatttgcctctgggaaaaccagtgagtctggagagctgcatgggctcacaactgaggaggaatttgtagaagggatatacaaagtggaaatagacaccaaatcttactggaaggcacttggcatctccccattccatgagcatgcagaggtggtattcacagccaacgactccggcccccgccgctacaccattgccgccctgctgagcccctactcctattccaccacggctgtcgtcaccaatcccaaggaatga

SEQ ID NO: 638 - protein, 147 aa, Homo sapiens
MASHRLLLLCLAGLVFVSEAGPTGTGESKCPLMVKVLDAVRGSPAINVAVHVFRKAADDTWEPFASGKTSESGELHGLTTEEEFVEGIYKVEIDTKSYWKALGISPFHEHAEVVFTANDSGPRRYTIAALLSPYSYSTTAVVTNPKE

SEQ ID NO: 639 - DNA, 20 bp, Artificial Sequence
  Synthetic sequence
tgctgtccgaggcagtcctg

SEQ ID NO: 640 - DNA, 20 bp, Artificial Sequence
  Synthetic sequence
tcagcagcctttctgaacac

SEQ ID NO: 641 - DNA, 20 bp, Artificial Sequence
  Synthetic sequence
tgtccgaggcagtcctgcca

SEQ ID NO: 642 - DNA, 20 bp, Artificial Sequence
  Synthetic sequence
tcagcagcctttctgaacac

SEQ ID NO: 643 - DNA, 20 bp, Artificial Sequence
  Synthetic sequence
tccgaggcagtcctgccatc

SEQ ID NO: 644 - DNA, 20 bp, Artificial Sequence
  Synthetic sequence
tcagcagcctttctgaacac

SEQ ID NO: 645 - DNA, 20 bp, Artificial Sequence
  Synthetic sequence
tgtccgaggcagtcctgcca

SEQ ID NO: 646 - DNA, 20 bp, Artificial Sequence
  Synthetic sequence
tcatcagcagcctttctgaa

SEQ ID NO: 647 - DNA, 20 bp, Artificial Sequence
  Synthetic sequence
tccgaggcagtcctgccatc

SEQ ID NO: 648 - DNA, 20 bp, Artificial Sequence
  Synthetic sequence
tcatcagcagcctttctgaa

SEQ ID NO: 649 - DNA, 20 bp, Artificial Sequence
  Synthetic sequence
tccgaggcagtcctgccatc

SEQ ID NO: 650 - DNA, 20 bp, Artificial Sequence
  Synthetic sequence
tgtcatcagcagcctttctg

SEQ ID NO: 651 - DNA, 20 bp, Artificial Sequence
  Synthetic Sequence
tacagccaccagcattctct

SEQ ID NO: 652 - DNA, 20 bp, Artificial Sequence
  Synthetic Sequence
tgtacagccaccagcattct

SEQ ID NO: 653 - DNA, 20 bp, Artificial Sequence
  Synthetic Sequence
tggggtgtagctgtacagcc

SEQ ID NO: 654 - DNA, 20 bp, Artificial Sequence
  Synthetic Sequence
tggagtggggtgtagctgta

SEQ ID NO: 655 - DNA, 20 bp, Artificial Sequence
  Synthetic Sequence
tctccaggaaagccgatggg

SEQ ID NO: 656 - DNA, 20 bp, Artificial Sequence
  Synthetic Sequence
tccaggaaagccgatggggc

SEQ ID NO: 657 - DNA, 20 bp, Artificial Sequence
  Synthetic Sequence
tggggccctgcaggagtgga

SEQ ID NO: 658 - DNA, 23 bp, Artificial Sequence
  Synthetic Sequence
gctctcctggtagacccgggttg

SEQ ID NO: 659 - DNA, 33 bp, Artificial Sequence
  Synthetic Sequence
ggttgctggaaactgctggcatcaaggcatctg

SEQ ID NO: 660 - skipped

SEQ ID NO: 661 - DNA, 30 bp, Artificial Sequence
  Synthetic Sequence
cacccttgagtccagggggtccctgttctc

SEQ ID NO: 662 - DNA, 36990 bp, Homo sapiens
atgatgttatcaggtgttcagagctcagtaaaatgagaatctcagagtcaaatacatttcttttatctctatgttacctcacagttcctaaagtaacacagaaatcaaaagtcagccttttgtaccttaacggcatcattaagatggatatgtaataaagcttcaatttaacaacttaaaagatatttagtatgcttaccatggttgagggagttaaattgtacttattctaaaagaaaatacacacagattccctcataagtgtatttttttagcctattataataagacataatgactctcaagtataattaggactcagacattgtgactccagtttagttctatgtttataagtcataagctcattcctgacccaggagagtgcatttatagaaaattatcctcccaggcatgattactttaagaaaactgatcagcatttctaatggatctcctattgatcaaagcaatgctattttgtactgtgtaaaatatgtatttttaatgtattaattgtaattcattttaattaaaagtggttcaaatttatgtctattatcacttaggtatattatagataatatagataatggcaatgcatttacctgataaattcaaattcactgagctattattacctttatttaatattagaataattctacatctgtgatttccttttgcttaaacttttgtcttggaatagatttatggaaaaatggtgcagatagtaaggacagtttcaatataccccacatccagtttcccctgttattaacagtttatattagtatggcgcatttgtcacaattaacaaaaccatgtgatacatcattattattaacaaatgcccttaccctattcagagttccttagtttttcactaatttcctttttctctttcaagatctcacccaggctaccacattacatttaaccatcataccatcatatcaccttaagcatctctaggctgtcgcaatttctcaggctttccttgtttttgatgatgttgatactttgagtgagtataggttaggtattttgtagaatgttcctgaattggtatttgtctgatatttttctcatggttagattaaggctataagttttgggaaggaagatcacatatgtaaaaggccattctcatcacatagtatcaatggtacacattgtcaatgagttatcgttgttgatgttaactatgatttaaataaactttttaggttctcatgttctgattctatggtgccttgagaatgctttaaaaattaatggtacttcagtcaagattttacctgcaggaaaaaatcactatgtgtttctagagaagtgacattttcaaagcagtatttcattttacaacagttagcatcaataaaaatgtattttttatttatctttacatttgtccactgtcttaaatatttatactgactcaatctcattcagattttggcagatcttccaaatgattaattggaccaattttaaataaataaatttatttatttatttgagatggagtcccgctctctggttcaggctggagtgcagtggcgcgatctcggctcactgcaacctctgcctgctgggttcaagtaattctcctgcctcagcctcctgagtagctgagattgcaggcgcccacaccacacctggctaattgttgtaattttatcgaaataagattaagttatttacaggtaagaggctcagtgatggaatgcaaaacagcctgaaattattatagagttgtgagcatgtagctattttcctgctccttgaaataagaaaatatagagttgtgagcgtgtagctattttcctgctccttgaaataagaaaatgtcatatcatagtccctctaatcaagattaaagaaacaaacaagtaaacactacttgctttctacaagagatgtcaaaagttatcaaaggaaacatactgtttaaaggaattatctgggagatatttttaagagaataacttattctcttaaataaatatagctttcatatataagataaacattaattattacaaaagcacaacatattacaaaattatatggacataatatgcacatactctaactgagccacaatagaattggtgccctgacactaataaatcatttgggaactgcagtttggagtatttagtacctgttatgtggccaagaaggtaatagaggccactgagaccttttccagtctaatataatgggcacaactcacattttttccttttagttattaggtaaaaattagtgttggtgtttacttcagtgattttttagaggatttacaatttttactgtgaacacttagggaaacccacttcccacctcatcctatagattttccctatgtgaagggttttcatagtaccttggggatgaaaggaagtcccccaaataattttcctgatgtctgcttccaatatttgacttcaagaataccgttttccaaatagtatgttcagagccataccaggcacacagagtctctaaaactctggagagactgtaatatttctttgcttgaaggaagggatcattcttgtattctgttcagagattacattaatgatatttaaatgtttctcagaagataaaccaagtgttggaatttatttgcttttgaccctgttcagcaatattcaatgaataaaaaagaaaaaagtcttaatgatagttcttgagccacatgactttgtctaattaaaaaatattttgcaagtcttcatataaagttcaaaacaacaaaggtgaaatgatgggaattttcttaagaaaggaaattctgcagtgacccaatcctttgagcaatcaacagtcattctagggatactcttgtattgtttaaaattacattttacaaaataaataatgtcctaaatgcctcaacatttttagaatcagaaaagttgcttaactgggatgtccaagatcatttagctagtaagtagtgaatccagtattcaaaacccaggctttctagctcctgaacttgtcctagactcactactctaaactaaatctctgtttaatattacatgctcatatgaaatgtttcatgtttaaaaggccaatacattcccataaatggaaatatcctcatttaatataattaatatattttaattatggaagcatgataaaattatccaaagcaaggaattaaaatagaaggatgagacaagttaataatcttatgagctccatgaatacgtgttcattatgtgcaaaactcttcctgttaagcactttatatacagttaaccatcacaatctaaaccactcttcggagcatgattattaactcaatttttcaaactaggaatcttaggctcagagaggttatgtcatctccacagggtcaacagctctaaaatgtggagcacaaattgtaatgggaaaggccaagatgattattgacctgtgagccactgaaaccagtgtgaattgttctgtatggaatagaagtacacttcatgatatatattgtaactgttgctgaaggattttattcattttacattggatcaaatggaaatcgagctgtatattaaagattttacaaaagctccaaattaagaagaaactatagaaactcaaataaaatgaaattttttttaaaaaagtgttttctaagtagtgtttcataaagtaatacaaatttttagttattaggctgataaaataaatctatttcttttagtatctttgtcctttctttttgaatgttgttacacattcctgaaagttggaagatcagcgttttaaaataaatgctaggaaagacctaatgtaactcttgattattttacagcatcaagagttcttccttcttcttgcttattgcttgacaacagattgactgaggatgctttagagctgacaggtttggaggatgagggatgagtgagtatgagcaaaactctgaggaggagcactgcatgcctcaaaagaacttggagagaataagagttaccaaaaaaaaaaaaaaaaaaagattttgccaggctataattggaatgaagtgatataagtgacatgaatgatgcttaaaatgttgagaattaaaaagtaaatattaaaacattgaaaaacttttttttaccctttttggtttatcatcttccttctctccttcaacttccatttttttcattcagtttttcccctcattccaactcttctttctttaattgaacataatagagactcggagttcaaaatatgtgttgtttctattgaattgatagattttttttttttttttgagacagggtctctgtctgtcatccaagctggaccgcagtggtgtgatcatggctcactgcagactcaacctccccaggctcaggtgatcctcccaccttagctactctcaagcagctgagactacaggtgcacagctccatgcctggctaatttttgtacttttcctagagacagggtgtcactgtgttgcccatgctgttcttgaactcctgccctcaagtgattcacccgccttggcctccgaaaatgttggaattacaggcacgagccactgtgcctggtctattgaatggaatttatgtttatcctttccaattttaaaatagttaactttaaagttgtgtattttacattcattgtcttcaaaccaaacaaaatccaaaaacttttctactttttgaattgaattttttctctccttttgaataataaaacctggtcattgatgtatgtgtactcatctgatatttttgatttaacaaaatcaaatggagggttcacgttagtattttatgctttttaaaagtagacatgcttatgctcttccctaaaacttttatttcagcattacttagataagccctggcatctgtatttttttaggttacacagatgatttttttgtataccctggtcaatagccacagtggagtatacctgcattctgatatatacactcttgacaaccatagagacaaatgatacttagctgcatttttaacattacctaacataagtgaaagggattttaaaacagtagtattttggaaaacagcagataataaaacattaattttgtgttgtgggttattggtattaagtatcatgtaatgcccacatctcaaagctcactatggaagaattggtgtcagataataggaagattgatattgttgaaaaccatgcattcagcaagccagccattggtagcacccaatgaagtgttcagtattcatctaagcagagaaagtagaagacacaatctttactgtaactttgagtgtttgcagtgtgtcagatggtcccttgaagaagaaatattaataaaaatgaattgcaaattgtctccaatttacctgaaagagatcaaaataatgtatctaaatatatggtgtttgaaaggtgtagagtcagtccatatttttcaagcccagtgaaggtaacagaacagtttctacttaagcagctgtttgttggtttctttggctcaagagagaggtataatatcttcttttattttacagctttttaatcataataataactattataaaattaacaaatgcacatggtaactaattcaaacaatttttgctttatccctttaaagccattatctagggaataatcacttcccgcttttttaaaaaaaagtttttctgatattttcctttttatctctaaataatatgcttatgtctcatttttatttcatcaacttatgtaatgttttctaactttctaatttgaaaatgaggaatttattttatttatgtaaacttttctctttctgccccattctcaaattccaagcagttatgttttcatttctaagtaattctatgggttggatttatacctttaaatggaatatacctgaacctctatttcttgttacttaaactttagccaggatgcactaactgccttcaatgtaagataaggggtcagctctccaacttttccctcaccactaatccccctctacctctcaatttttgtaagctattccattacttttacactgataatatttaacacatatatgtgtatatcttgtctttgtgtaaataaagttctataattgtacttacattttatatatgctttggtaattggcacatttgtgagatgattaactgatacaatttaacaatattataattatgtatgtatttttcattttaaaacaagtaacatggtttgatctagaggaggaatttaaacctctcattcaaactctgctacttgaagaacacatcaaactcaagtggatcctctctgcttcaattctaccagttgttcaagttcatgcctcattttgaattgattcctatttggacaatatggctatttacacgttctaaagaaacaaattccctttgcttttattcacactatttgtgaaacatcttgtattctatgtgttttagaagtacttttttttttttgctctaccttaatccaaagtaacttaaaaaaaaaagataaaaaggagttaaattttgaattttcttatacctagaaatatattttgtttgccatcacacttgataataggttgtctgataatagaatttgattcaaaatattttctctcatcacactgaaagcattgattgtgttctagtgtcaattatggctaaggaaattttaatggcaatctaattttcattctttttagttagttatcttatttttggaagattataaaatcttgtttctattgttaatgctctaaactttcacaagaatggaacttttaaattgatcttcttttgtacttttagcttgatgactcttggtgaattttctgccattactttgtttattatttcctatctactatttgctgctctcttgagactaatgtcgaacaacatggattattctgtatcttctaagttttattttgtacttttttaatttttaaaattctcctaaaatatatagaaaaatctaagatatagaactccatgcatttttacatatacatattttcccatgtaaccatcacatagatcaaggtatagaacgtttctagcacctgagaatgctcactggtgccccattctggtaaagtgccccttttgggtaaagtaaaaggtaactacaattatgacttctccttttcagcaagcattctactgaaattttttgtttcacaaagcatgacctttacccagaattgatgttgttgtttttggtagcctattttttttttttaataaaagatactctgtctcctcaaatttctctaggaatactaactttaacttctcaatatcccacaatgtttgcttttttttttctaaagttaaaagtttggtctgttcatcttagtctttcaattttatgtttggtagatcttcattaccaatttattcttgataatctattaatatttatggaagaaaggccaggttggtgttggccaggtttgcatctgtctttatacaggtctgtttcccagacaaatcctctcttgaaagagagggatgactgaaaggtctgtgtatatacatgtatggtgtactgacaggcaggctacattttaggatgtatggatgaggagtagataagggagtcacctttccctcgactccaccctggttctagctaaaatggacatggataccctaggagtcctaccttaattaatgcagatattatccttttggtgatagcttggagataaaccactctgctacatatttaacatagagagggaagtgggacaatgttttctgcaacattattgaataaataatccatggattaatcaacttgttttctgatctacatcacatatttgccatagaaatctgtgacttctctgctagaaagaaattctaacattctcagatgagtgttctagactgtagcttctgctttgatctcctcactagggtaatcttatgatttatgataactttttttgtcttcctctggtttttagtgatattatctaacatttcgccactgtacatctttgtttttactgcaatggaaatttgaaggccagagagtgtgataaacacatgggataagaccattttcatgaactgggagctgacattgctttgactggaaagatgtgtgaagaaaaatagatgctagatagacaaatacatgatatgatatttggacagacatagatccatagatggataagcatagataaaacatatctatatatatgtgtgtgtctgcatacatagaaaataagaaagagttcagaataaatatttccatattgattttaactataggaaatcttagatacaagaataacacattcattttttaattttagtagttgcctaagtattctctaatatgagattaatggtgagtgggtaagatagtaatgagaaaacaaaagtactgcctttatatgcaacattgggatttcattctaaagaagatacaatcatagtaatgttaataaaagtggaaatgtagcaatatatttttcaaaattgtaaattaaacatgacaagaataaatattgattgatttcattgactatataaaattaggtcaaataattttaaatgatttttttcaaagtatattttctttcttctggatagaaaaacatgacattttcgttgtacaaatttgaaaagtaaagtataaagacataaaaataatccataatctcttaactagggctaaactttgttaaatgcattgtgtatttaaattaaatatcattttaaaaattattattaatttacatctatctgtgtgtataacctggattccacttattatgcattatatttttataattcatttaattcattaaatagtctttgaacgctctctttcaaagctgctcattatttcattatacattcattacttcatttagtgtaacccttactgttaggattttggattgattataatttttcaatattataaaaatattgtagtaaatatatttatacatgttagaggacacctgagattactgtctttgaataaattcctagaaggaaaattatttggcaatataaacgaattcacgtgtttaaggcttttgatagatattacaaaattaccctcaaaaagtttgtacactttatttatttatttgagacggagtctcgctctattgcccaggctggagtgcagtggcacgatcttggctcactgcaagctccgcctcctgggttcacgccattctctgcctcagcctcccgagcagctgggactataggcgcctgccaacatgcctggctaatttttttgtacttttagtagagacagggtttcacagtgttcgccaggttggtctcgatctcctgacctcatgatctgcctgcctgggcctcccaaagttctgggattataggcgtgagccaccgcacccagacagtacacattatttattactttcatccagacaggcaacactgatttcccctataacctctctaatatcactattacttttgttaaaatctttgctaatgattaataggccaaatttggttccccatgtttattttaatatttgtttctttgattactagtgaggtttgacatggttacaagtgtttattaaccatttgtatttttagataattatgttttttactaaattttatgagatatattaatatctttattcattaaaggaaaagcacttcatctgtcatttgtattgtactttttttattttgtggatgccttccacttttaaaaaccttcattgttatgagattaaatctagcattctttatctttttcgattttgcctttggtgtaatgctttacaagtcctctctactctcacattaaataagtattcattttcacttttattagaatgtttgagctttatttttccatttaaatatttactccaccagaaatctcaaatcttaaactaaatgcctgactaatgaaaactcctgtggcctgtttatccagaagactaagggaagaggaaagaagttgtagtcacacataggtcctgccccatcattgcatcttctttgtgtgtgttggtgaagtgtgaggctccatttttacttatgttgccctctgtaaccctgtcagcctatcatcttgccaccccactggcctggtacaataacttccaagcaaactcagatgccaactaaagctgctcttcttcaaagctataaaattagtaaaatgaaaggaagtttcacctctccaaactagaggatgatgatgaaatctgatcaaggtctcttcaacttccatttcacagatcatgatgttaagcaggtgcttagtgtcttcctttaatttagcttgatcagggaaatattgcccatgcatggtaccactagcattgaccaccctttgcctctgcttttttcatatactttagtcattctggagctgtgttgagcatgtgcatgggggttgggggagacagagacagaggagaataggaatattggaagaatcaaactggtaatggacatctgagttcacaacatctttgtacctagatttctgtcaaataattcttgaaagagatggtaccctccagttgaatgtagaatctacaaaaacaccagttattcaagccaacttttcttcaagagccacagtatgtctacactgaaagtctagtgaggcaagttatcccgtcttctcacctttatgatttccaaaagtgttgaggaatctccaaagcacaagtggcaactgctttgatttgattcattgatttgtttcctttttactaaatctcttcctattctgaggacaattttcacatattttaggattcaaaattcttaatgcatattcatagtagttttattaagatataatttacacaccataaaaaatcaccattttaaagtgtatcactcagtggtttttagtatgttcacaaaggtatgcaacaatcatcattatgtagttttagaatatttttatcaccccaaaagaagccccatactctttaaccattaaccacataaccatcaataatcacttcctattacacccagcctctgacaaaaaatactctacattttgtttctggggatttgcctattctggacatttcataagatggaatcatatcgtatgtggccttttggctctgtgttctttcacggggttttcatcacatccatgttgtaacatgtacctatacttcatttgtttttattgctaaatactaattcagtgtttgaatatcccacattcctttatccatttattcattggtgagtaatgaggttgtgtttactttttggctagtatgaataatgctgctgaacattcatgtaaacgttcttgtgtggacatatgttttaaattcccttgagtctgtaccaagtagtggaattgccgagtcataacttactctttacctttcagaatcatcctacttttgaatgtgtatatgaaatatcccttatttttcactacattctttaaaaacctttatcctaactttggtttccatcaaaatacaggcatacttcattttatggggctttactttattgcacttcaagatactgcattctttacaagttgaaggtttgtggcaaccctgcattaagcaagtctgtcagcgtaattttttcaacagcatgtgctcacttcatgcatctgtgtcacactttggcaattctcacaatatttcaactttgtaattgccattatttaattattactgtatgtgttatggtgatctatgatcagtgatctttgttgttactgtggtaattgttttggggtgctatgaaccacatccacataagacagcaaacaatcattaaatgtgacgtgttctgtttcagcatccctatctctctccctttcctcaggcttccctgttccctgacacacaacgatgttaaaattaggccaattagtaacccattcccacccctaatgttcaagtaaaggaagaattgcgcatttctcactttaaatcagaagctagaaatgattaagcttagtgaggaaggcatgttgaaagccaagataggccaaaatctaggcctcttgcactaagtacttagccaagttgtgaatgcaaaggaaacattcttgaaggaaatcaaatgtgctactccagtgaacacatgaatgataagaaaacaaaacagccttattgcaaatatagagaaagttttagtgatctagatagaagatcaaccagccacaacatttccttaagccaaagcctaatccacagcaaggccataactccaattgtatgaaggctgagaggtgaagaagctggaaaaaaaaggtttgaagctggcagacggtaccccatgagattgaaggaaagaagtcactgccataacataaaaatgcaaggtgaaacagcaagtgccaatggagaagatgcagcaagttattcagaagatctagctaagatcattgataagagtggttacattaaacaacagatttgcaatgaaggtctaacagccttctactagaagaatatattatagctagaaaggagaagtcaatgtctggcttcaaagcttcaacgaacaggctgactctcttgttaggggataatgcagctggtgactttaaattgaagcaaatgctaatttatcgttcagaaaatcttagaattatattatttaattattcagaatattaataattatttactattcagaaaattacataataattatattatttactattcagaaaattacataataattatattatttactattcagaaaattaaataattatattctttactattcagaaaattaaataataactatattatttaattattcagaaaattaaataataattatattatttaatcattcagaaaatctcttaagaattatactaaatctactctgcctgtgctctataaatagaacaacaaagcctggatgacagcacgtctgtttacagcatggttcactaaatattttaggcccagtgttgatacttatagctcaggaaaaaaaaaaaagatttctttcaaaatatcactgcctattgacaatgtgcctggtcactcaagagctctaacggagaggtacaagggcattaatgttattttcatgcctgctaacgctatccattctgtagcctatgggccaaagagtaatttcaacttttaagtcttattttttaataaatacattttataagactatagctgccatagatagtgattcctctgatgggtctgggaaaagtaaattgaaaatcttctggaaaggattcaccattctagatgttattagaacattaatgatttgtgggaggagggcaatatacaaacattaataggaaattggaatgagttgattccaactctcatggatgactatgagaggtttaagacttcagtgatggaaagaactgcagatgtggtggaaatagcaagagaattagaattaagagatggagcctaaaattgtgactgaattgctgccatctcgcggtaacttgaatggatgaggagttgcttctgattgataagcaaagaaagtggtttcgtgagatggaatcttctcctggtcaagatgttatgaacattgttgaagtgacagcagaggatttagaatattacataagtttagttggtaaaacagcatcaggctggagagtggtgctaccaaaggcattatcataaagacttttaaaagaggaaagttgagttgaattgcaccaaaggtaaatatagacgaaaagaaggggaatttaggaaaatttactcagaaaattgtcattttttactttaaagctatgaagcgtaaacttcaaatttctgagtataaagatggttagaaggcacgaaagataagtcccgcccattgcctgacacatagtaatcccttaacaagctgataattctagaacatgttaccttttgtagttgaaactaaaaatctgtttatgttgttattattagtttttaatgggcctttcttggcaggcaaatagttaagtctttatttctttgtttccatccaggcctcttatgtgaggagctgaagaggaattaaaatatacaggatgaaaagatggcaatgttgcctcccccaggacctcagagctttgtccatttcacaaaacagtctcttgccctcattgaacaacgcattgctgaaagaaaatcaaaggaacccaaagaagaaaagaaagatgatgatgaagaagccccaaagccaagcagtgacttggaagctggcaaacagctgcccttcatctatggggacattcctcccggcatggtgtcagagcccctggaggacttggacccctactatgcagacaaaaaggtgagtttattttgacttcagtggtcagtttctgttggcttccttctgtataaaaattattttaaattgagattagtgaaatttagtgaataaccatatcatgaccagaatgttaaattaaatatatatatatatatatatatatatatatatatatatatatatataggatattcagaatctgtactttttcaaatttttcattgaaattggctctggcattggcatactacttttaatttttttttttaattatactttaagttttagggtacatgtgcacattgtgcaggttagttacatatgtatacatgtgccatgctggtgcgctgcacccactaactggtcatctagcattaggtatatctcccaatgctatccctcccccctccccccaccccaccacagtccctagagtgtgatattccccttcctgtgtccatgtgatttcattgttcaattcccacctatgagtgagaatatgcggtgtttggttttttattcttgtgatagtttactgagaatgatgatttccaattgcatccatgtccctacaaaggacgtgaactcatcattttttatggctgcatagtattccatggtgtatatgagccacattttcttaatccagtctatcattgttggacatttgggttggttccaagtgtttgctattgtgaataatgccacaataaacatatgtgtgcatgtgtctttatagcagcatgatttatagtcctttgggtatatacccagtaatgggatggctgggtcaaatggtatttctagttctagatccctgaggaatcgccacactgacttccacaatggttgaactagtttaccaccaacagtgtaaaagtgttcctatttctccacatcctctccagcacctgttgtttcctgactttttaatgattgccattctaactggtgtgagatggtatctcattgtggttttgatttgcatttctctgatggccagtgatgatgagcattttttcatgtgttttttggctgcataaatgtcttcttttgagaagtgtctgttcatgtcctttgcccactttttgatggggttgtttgtttttttcttgtaaatttgtttgagttcattgtagattctggatattagccttttgtcagatgagtaggttgcgaaaattgtctcccattttgtaggttgcatgttcactctgatggtagtttattttgctgtgcagaagctctttagtttaattagatcccatttgtcaattttgtcttttgttgccattgcttttggtgttttagacatgaagtccttgcccatgcctatgtcctgaatggtaatgcctgggttttcttctagggtttttatggttttaggtctaatgtttaagtctttaatccatcttgaattgatttttgtataaggtgtaaggaagggatccagtttcagctttctacatatggctagccagttttcccagcaccatttgttaaatagggaatcctttccccattgcttgtttttctcaggtttgtcaaagatcagatagttgtagatatgtggcgttatttctgagggctctgttctgttccattgatctatatctctgttttggtaccagtaccatgctgtttgggttactgtagccttgtagtgtagtttgaagtcaggtagcgtgatgcctccagctttgttcttttggcttaggattgacttggcgatgcgggctcttttttggttccatatgaactttaaagtagttttttccagttctgtgaagaaagtcattggtagcttgatggggatggcattgaatctgtaaattaccttgggcagtatggccattttcacgatattgattcttcctacacatgagcatggaatgttcttccatttgtttgtatcctcttttatttccttgagcagtggtttgtagttctcctcgaagaggtccttcacatcccttgtaagttggattcctaggtattttattctctttgaagcaattgtgaaatttagtataatgtttagtataacatagtatacattgtttagtataattgtttagcataacatttttggacatgacacagtgatctgccaaattttataatcatacctattttttcctgctaataattaactctcatgtgtatgcagacccaaaaatcacttaaaagtttttaatgagaatgaaaattgctaatttcaattttaaaataccaacaattctttttattaaaatttcaagtataaggtaacttgatcttgccaatactatgtagtatgttgtgatttttcatgttagctcagatgacctccggtttataaagtctccctgataattttgacagtcatgtgaccctgttccctcttcactctcattcttccccctttatatttttctgtatgatatctgtcacatcttgccttatattagttactttcttcttttcatttttctaggaagttccttgaatacaaaactcatgccttatttttgttcaaactccttttcattacctgttatgatatagtttctgactatacatgtattagtcttttttttttttttttttttgagacagagtctccctctgttgcccaggctggagtgccgtggcgcgattttggctcactgcaagctccgcctcccgggttcacgccattctcccacctcagcctccagggtagctgggactacaggtacccgccaccacacctggctaattttgtttttgtatttttagtagagacggggattcaccgtgttagccaggatggtctcgatctcctgacgttgtgttctgcccaccttggcctcccaaagtgctgggaacacaggcgtgagccaccacgcccggccgtattagtccatttttacactgctataaagaactacctgagactgggtaatttataaagaaaagagatttaatttactcactgttctgaatggcaggggaggcctcagaaaacttacaatcatggtcgaaggcaaaggggaagcaaggcacatcttaacatggtgcaggagagggagaaagaggagggaaatgccgcacttttaaacccatcagatctcatgagaactcactcactcactatcatgagaacagcactggggaaaccgctcccatgatccaatcacttaccaccaggtccctcccctgagacgtggggattacaattcaaaatgagatttgggcggggacacagagccaaaccatgtcaatacaattgcagaaagaatggatgaataattttttaaaaatacagtctactgagatttaagacaaaaaggattgtacttgaggactaggtattaattttaaaataattttccatgtaaaagtgaattttacattaaattgtatttagatagaactgatacagtgaaagggagcaggaaaataaaaggacacctgaaaacaatagactctgatttgttttcttgagggaacgctgccgcatacaaataaaaagcctgactcacagacttacctcctgaatacggtgagaaatgcttattgccagaaacccactgataaccctatataaaatttagaaagtcagtgtctttcagctaacacaagtcatcttcctgccaaccggagaaaaataaggctgggatttgaactttgtctttctgatttctaagccaatgctttaggttgctttaatattttgttgttactgctggttgtttttatttcttaactgaatactaaagctatggaaaaggacacttatggaatggctacaataacatttcaagaatgtttgcttctattcatatcgttttttaaattaccgtggttagtaagtgaggaatcctcttaatttaagtcccttttaaaagctaatattagtattataactaaaataaagaaattgaactcagtgattggaaggattcttccaactctgacgttccttcaacttaggaaaatattttttgaaataactcatattttggaacatgtgctgctaaccataacaattgccagcaagtattaaaattctcaaggttttatgataaaaatattagagatagctagtttctatttggctttcttaaaatgcagtgtaatggaagggaaagaagttgtactttaaaataacttaaccacagttattgttactggtgaaagaaaatgaaaaatatgaaatacagtattttgaaagctctaagcaatacatgctaacaaatagctcaatttttaaagttactatgaagaagtggacttggagttcattggccaaggtgacattgatagatgcgttgatgacattggaaccacattgctggagtctgatggcagtgtttcttcaatataacactgccatgtagaaaggtaaactgctgatattgatgtgaaaaattgatattttggattctcaatttcatcctttctttttcctcctgcagactttcatagtattgaacaaagggaaaacaatcttccgtttcaatgccacacctgctttatatatgctttctcctttcagtcctctaagaagaatatctattaagattttagtacactcatatccttttaaaaatgattacatccagtggcactttatggtgtaatttttgctattttattcaaatatagatgttataccttttgcaccttgaaagactctggttttagtttattaatttcagtattattaatataatttgtcatgggtctcagagaagactgggagagtggcaatattaagattttaggatatgttacttttatttattactctcttgttcaaagagacaaaatagtctacaagctcatttagaatttttttcttaggaaaagttgtaagcatttcaacaagtgtcatcctcaaatatttcaaattcccactgtcgtctcttttgttccttgattctaagctaccttattcagcatgctcatcatgtgcactattctgacaaactgcatatttatgaccatgaataacccaccggactggaccaaaaatgtcgagtaagtgggtataagtacattttaatatagttttggtattatcatttcatcctttccttttcctgccaggaagttactgcatttatgaagatggggaatctttaccttcccatgttatatgcttgcttttcttttgttctttacctcctctatgatattaacctgctagattagaaaaattagatgctacagtgttttctcaaagaatgaacttgtcagatgctccatcctgttcttagacatgttacacatattttattcttgggtgtatgttttataattatatgggtgtatttttaaatgattgggtgaatttttgatagaagcaatgtaggaaatttttaggcagatctgagacctatattcttagttatttcaagtacctctgctttctgggagtgtttctgatattgacattttaatattttctggatagacctattgtagtttaatagggtgtgtccataacccaacagccatcctccaatatatgtcttccagtggttaattagagaaaataagttataaagatttacatggtggttgtattcttttcacatctagtatcccaatggaatcttgtgtttaggtacacttttactggaatatatacttttgaatcacttgtaaaaatccttgcaagaggcttctgtgtaggagaattcacttttcttcgtgacccgtggaactggctggattttgtcgtcattgtttttgcgtaagtactttcagctttttgaaacggcaaatttatgaaaatctcaggcagcacagtgttccaataacagcaaacctctggggtctgatttttccagcatggaatgtctgtatttaaaggaaaatggaagctatatgaaagctagtcattgataggcaaatactaaatttttcaaaaagactatctcccactcagaggtatgtgacatcattgagattgatcatcttcctccatgctcagcacttggatggatagtctatgcagtgccaattaggtttacactttttccaagttcttgtttaaaaatgaataaaacctataagaagcacacaaaaaactcaggcctttaaatacaagtacagtgctctttatattaccctgtattattcaattattttatatttttgtattaaaatataaaagtatatatttgtaaaagagctgtcactgcttactaagcctaagattaatgcattgtatacacattatatatacactcagtttattttcaaggaaaatattacattacagtataattttaatttattcataattgttactcttttcccaaatgtatttatcagaaaaatggatttttacaatctcatatctagatattctattttccgttaatgactttgaattatcaaagtaatccaggttcactggagccacctagacaatacagaagggtcttaagattcctaatatccgattccttcatccctgcctaacctcttttccatcaggctccctccttttgaggtcacatatgatggggcagttccatctgctacctgctgctaagaaaacattgtgcaaagaagactgcctcttctcataggtctcctttttttcctattggtacaattcaaatactacaaaattcacaattttaaagtatacaattcagtgtttttcagtatattgacaaacttgcgcaacatcaccactacctaattagagaagtttaacaaccccaaatagaaactctgtactcattagcagtcacttcaatttccttctctccctggccccttggaaaccactcatctatgttttatctctatggatttgtctatttggatttttttatgaatggaaatatcaaacagtatgcagccttttgtgtctgacacttagcatactattttcaatgttttataaaaaattaaaagtctaaattaccataatgttaagggtccaacaattgaaacatttagttgtttacgcatttaagtgtatgaatccaatttaataatatataatatctgtattttgtttgcatcaaatgagtcaaatcaatgctaattaaattaagttagttatgatagcaaaaaagacttgcagaactatacatttaaaatagaagccccaaacgtagaaaataccttgactaaaggctcaggtaagtatcatagactctatctaaattctgaataattctgatttaattctacaggtatttaacagaatttgtaaacctaggcaatgtttcagctcttcgaactttcagagtattgagagctttgaaaactatttctgtaatcccaggtaagaagtaattggtgtgaagcattaggccactcataactccaactatttgggagttgttctttgttcgtttgtgtgtgtgtcgtcactgtgtgtataaactcccctattacagatatgtgacagagtttgtggacctgggcaatgtctcagcattgagaacattcagagttctccgagcattgaaaacaatttcagtcattccaggtgagagtggggttaaacaccagggctgactttgatcttttgaaagaaagacataaaaaaaacctttctttatgcaattttaattaaatttgatttcttctgttttccacaatcattatcaaaagtcaacctttgagtttaatcaattgcatgggtctttaggatgaggatgactacttggctcacatctcaacttgaaatcttccctcctgtctgagggtttgtttttccatttgcttatacaggaaggaaaatttcaatccattttaattgattttaaaatacttaggaaagagatcataaatatcagcatggggatattgcatgacattgttttttattttttctcagcaaaccatttctttattgaaaattattacaaggtgtcactatatgctgtaatttgttttggtgccatttatagagaagtggtttgtttgacaaacattagaacttacaaaaattatttttaaagtggtttgaatagccaaattgttcattttgacaacctaggtattctttgagaatatgttcctatttttaaccatttgctgtaatatataaaaacaaagtatatataaaatagcaaacccagaaggctttttttgaattaggttacttaaggtcattgatttgatataatgcatgactttctaggaaagcttgtgttttttgtttcgattcagaggctttatgtcattacaaacacttttttctcccattttcaggcctgaagacaattgtaggggctttgatccagtcagtgaagaagctttctgatgtcatgatcctgactgtgttctgtctgagtgtgtttgcactaattggactacagctgttcatgggaaacctgaagcataaatgttttcgaaattcacttgaaaataatgaaacattagaaagcataatgaataccctagagagtgaagaagactttagaagtaagaatgtccttgcatttgttattaggttgaaataatgctaaaaacattgctctcttttaataatgaaatgttgctttcattttaatcatttcaaagctattcaaatatatagaaagctgctacagtgtgaatttgggtcatgttatatatgattttcataaatcatcctggttctaagctatctagcagtactggcaaaaggaacacaggatagttccataattcctaatttctatatcataaaaaagaattattttctctagagaaataaatgtagccttgaattaataacattaaccattacatttaacaatataatagattatatattttatataattttattatatagtacatacttatatttattatatataatgtgacatatttattatgatagatttttatacttaatagattgtactcataactataacatcttaaagttctattaatcatatataatgataatattaattatcaaatataaagatagtatctgtatcttgatagtattcctaaagatttgtacaaagcaaaatcatttgctcagctttatcaacatccactttgtaaccaatgacgagtttcatagctgtttttaatggcttccttcaatataggctgatggcaagatatcaaagtttagttcagtagaattatttctgtaggtaccacatgagatcatctgtatgcactctcagaagtctgcttaattcagaagtatcaattagagtttcttacataaagcatgaattgaatgttctctaaacaattatcccctagcatggtgtctctcactggaacggttgatgaatattggatgaagatatgatcaagattgtactttctgtctgacacctggaatgtatctatctgatggtgcccacgtgaatacataaatcttaatagataatttgacccaggtgtggtatggaagtcacgaaacctttcaaatatatgtgctgttgccaaaaggaaatgagggaggaaaggtcaggattctccttagataataaaaagtaatatacatcattttcttattttaccaaatgtgtcctttctcactcactgtgataaataaaatcaaataacacctagcccacatggtaaaagactataaataaaatgacagaaaaaaatagaagccttaacaagaaaactgaaagttttgaagtaaaatgtttagcatatatatttttactaccaccatttgatgaggaatttagcatattttccccttctttttatatttaccctcttttccagtttctgattgttacaaacatgatttgaaacttatttccaatggatggagaattttatttcttaatttatatgctgtaaaattaatatatctgatgagtaacttacatttaatattgtagattattttaccacacttatttaaacttaagttttctcactgggatctgtccttttattctgagtcttgctcctatttctgagtttatactgtgaatggttttcttaacctttgttaaaagaaaaattttcaacaaattaaatttagcagcttatttcagcaatgaaatagtatttattgctgaaataagataataataataatgatttaggcagcactcagaaccaagagaagttcggagagctcaactcagcaacatgagcaggagtatttatagacagaaaaagggagtgacgcacaaaaacagcttgattgcttatagcttgacatttgccttatgtggacattgtctgataaatcagcaggctgtggttggctgaagctcagctgctgtgattggctgagacagctacttgttacaagaatatactaatagattagaatgcaatttgtttacatatgaagttagattgcaattctctatgtacacagacagcctttaatcaaatttaatttaattcatcgctttctggaattgcttcatgtatttttttttttttttgctaaaaaataatacaaaaaaagaagaaaaaaaaagaaaccccgtctctactaaaaatacaaaaaattagccgggcatggtggtgggcgcctgtaattccagctactcaggaggctgaggcaggagaatcgcttgaactcgggaggcagaggttgcggtgagccgagatcgtgccattgcactccagcctgggcaacaagagcgaaactgtctcaaaaataaataaattaataaattaataataataatagagcccttgagttatgtgaattatctttatattatatttaaacatgaatgcatgacaattagctaataatgaatcttataccacaatcctgtcttccaaatctgtacattattctttattttcttctgaaatgtagttttagtgaagaggtgtttaaatcaagtctgaattttgcttctgtttcctatgtcatagaagccatttttgactgcataattgattcaaactttcatttattggtgcgtttattacatggtttccctgagctatagcaataaatgatagcctcagcccttgctttcacagagcttatcatctagtgggaatgaaaaaaaatgtttaagggggaacagacaaataaattaaaaatatctcaagttataataaatgccatgcaaaggaagtgagtctcaggtgctgagatatcaactagatgagaagacatctctgaggtgatggcatttaagctgagatctaaaagatagtaagaagccataaaatagtttaagtgtgggtgtgagtctatgtgtggggggtgctgcttcaattaggagaaatagcatgggcaaaggtcctgaataaagggagggtatgggtttaaagaatggaaaaacagcagcgtggtttggtaagagaaaggaagaatggcaacagagaaagtagcagaaaaaataggggtcatatcatgcaggacatttcagcccatgggaaggagtttgtattttattttaaatgcagtcatttttattgctgtctgtcttgtgcacaactgattgagcaagggtagatggtagatgggaataagaaaggtaagttgaaggttgcttctctcatctaggcaagagaaaataaaggtttcatctagagtgatggcagagaaatgaagagaaaaaagatgagctcaacatacaaagtctgtagagcttgctgatggattaaagaagacaggaagcattgaggatgacttctcagtttctggctgcaataactggatgggtggtgatggttaatgaggaaatggtggacacatttgtagaggaaggtcactattagctagctaaaattaaaatgagatgcctttgagatgtccaggtggatatataatatagagaattggagatttaagtatagaaatcagagggcctgctgagtttggagataaattccagagcaatcagcaaaaagaaaggacacacacacctctacctctgaacatccctgatatttttaagtagatagagaatgggaaacctggtatttaaagcaatctggtaccaagatctacaactctgacatttagaattcaggtagaaaagaggacccagaaaagaacacagagaaagagccgccaataaagtaagaagcaaagatataaataatgaagccaagagaagaaaacatattgtagaaacagatgtgcttgtgtagaatcatgctgcaagatcaaggagtaaggatgatgaagaaagaaatatgcattaggttaagtaacagggaagtcatcagagaatttcttgagaaaatttgggtaagtggtagggttcaaggtaagaataaggtgcatacaggggtgaaaagaagaggtcagaaagaaggtaatatgtgtagacaattctcccaagaaatttggctataaagggaagcagaataatggggcaaatggctggcatttaaaaaaatatatgggtttttgtatggatgttttgctagtgataatgaatgagtagttatatatgaatcaattcaggagagagagggagaagtcaagtcctcgtgaaagtgaaagagtaaaggggagcgacagctccaccgaaacaggaggaaagatagaagagaagactgcagagttatcaaaagatgattgagttcaaacccaatggtttttatttcctcaaagtataagatgggatcattgcctgagagtgcaaatgaggaagagaaaattctacagatgatttgatgagaatgcattatatatatggtcatatcagggcatgagaaatttagtgtattttgagtgcaaatttgatgttggagattacttacttaaaatataaccattcacttggttgtgagagtttctccaccaacattcagccatttggtagccagcatggaaaagacagatgccagattatgtgtagactgtggttctgccaggttaggcactgatgataatgaatgcccatggatttaagctgtacaaagagtgacaagaacttggttgatagatcatgagaaagtgctaaggcaaatgaattggcaatatttaaaagatcaaggaattataatggtaaaggcaatctacacagagaacctgagcataatctaaaagcattttctggtgcctatagcaaagtattttccgaaatgcctttccaaattcacaatcaaataaattaacccactgtctcacctcctgctgaaaaacatacaatttgtagatttcctttggtgttgctgtctactttgatgctcatcaaacacttttttatgctgctacagatgaaagtggggttcatgtgcacagtgtgtagctaaatgtgcagtattatggagaaatatactgtggttatattgggctaaaacaggatattctcttcctcctgtttttctaatatttgacatttaatagagaaagttttgaaaaaaccgcaatattggccttcactactaacaggaattttcctatctccttcatctacagctgttttcttgtgagaactacatttgccagagtgtagagtatcatgtgcaggccctctgcccagtcctgatcccctgcactagttttctcagagttgcattatttgcccttcgttggggatatactcttcacttccataggcccaagccatacacaattgtcataagttgtctttctgagcaagggcagaattaccatttttttttctattttgctacattaatcttgaaaattaatttaaaaacttcacccagaatcttcattagatttaatatcaattctgtatttttgttatatcaattttcattttccccatacgtattttagtgataagttggcatttatttacccccacccacaacctttgccgttatgctgcattcccttttaaaaataggtttattgaggaataatttatatgccacaaaattcctttttttaaactgtataactcattttttaaactatactcagagttgtgcaacgatcgccactatctaatttaaaatattttcatctttcccaccaagaaacccagggcccgttagtagtcattccccatttcccttttctcccagcccctggcaaccactaatctactttctgtccctagggatttacccactctgtagatttaatatacatggaagcatataatatatggctttttgtatctggcttcttacacctagcataatgttttcaaaatttatccatggtatagtatgtatctatgcttcatttctttttattgctaaatgatatttcattgtatgtatatgctatattttgtttatacattcatcagttgatggacatttgggttatttccgtcttttggttataatgcataatgttgctgtaaacattcatgtacaagtttttgtggaaatacattttcaattttcagttctcagtatatacctagtagtgggattactgagtcatggttctttttttttttttttttttttttttttttttgagatggagtctcactctgtcgcctaggctggaatgcagtgtcgctatctcggctcactgtaagctccgcctcccgggttcacaccattctcctgcctcagcctgccaagtagctgggactacaggtgcccgccaccacgcccagctatttttttgtatttttagtagagacggggtttcattgtgttagccaggatggtctcgatctcctgacctcgtgatctgcccgcctcgacctcccaaagtgctggcattacaggcgtgagccactgcgcccggccgtgattcattctttatctttcagaatcatcccacttttgaatatgcacaagcaatatttcatttttctttgcattcaattttttcccatttttaaagatgttaaccttaaatcttcttgaagccaaccatcttaataatttaatgtctagttgtttagaaattattgtaaagttttctacaaacctagagtgagctacctgcattgctttacctttcatcattcttatactgtgttaaatacagtagtatagcagtgtgctaatagacagctccagagcccattcatataattcagctcctcagtggttgataaatgtgaaccagcattagtttaaaggataattctaaagtaatccatccttattaaaatattttggatgtttatgtatgcaaaattgcatcttatcctctcccatactcactctaccaggcccatccttcccgaggttcaggagtgttttcaggaaagcttttcatgcacattttcacctacatttgcacctcaaactgcaaggctttattgttttatctgtgtcttctaagtaagataaaatgatgatgtgtaattcaatcaatagttttatctcaaattgtataatagtttaactaattataataactcctgtttttgagcagctagtacagaatgtgtggatcacagtatcaagtggtttacatgcaatatcctatttatactatttaacaactttataaagtaggtattcttatacgtattttacagatgcagcagctaaggcttaatggcttaaagataattcacttacttaagaagggatagaagcaacattcaaatccaagaatatctgatttcatagtctttcttccatgattactccaaaagtctcccaataatcagattttttaatttgacctgagtaaaataggaagtcaggttcttatagtagaatagatatttaagagagatgacaaaaggttttttagtcatttaaacatttactatacaaggatagatctgcccccagtcttaggaacaagccttaacagcaaatgacagaagagttgatgagaacttttactactaaaaattagcacaaagaataccatgaaaggtgaaacatggaaaatctgcattgattacattgtcatctcctcaacacctagaattagtaggtcctaagtaagtatggactggtgaatgaaaagtaagataattttagaaaacaaattttactcacttatgttactgccttactgagtctgcctcttccggagtattgtaccacataaggatgttttagtcaatagcggaccatatatataatggtgatctcataagattataatactgtatttttttactgtaccttttctgtctttagatacacactttccattgtataacagttgcctacaatattgagtacagtagcccactctacaggtttgcagcccaggagcaataggctataccacatagcctaggtgtatggtagcctataccatctaggtttgtataagtgcaccctaggatgtttgcacaaggacgaaacgtcctaatgatgcatttctcagaatgtatcacagtcattaagtgacacatgaccgtacctttaatcatacttaaaatccaaactcatttctatgatatgcaaattccgacatgatccggcccctgcctacctctgccatcacaatcctccctctcaccacactgtagccacactggccatcttgctggcttttccacacaccaacttcatctctgccttagggctttagttctttctcttcccccagcccaaatatctcttcaccagtattttcatggctgtcttctttgtcacacttaggtcttagtttaaatatcatctccttagaaagaccgtccctgactgcagcctaccacgttgccttaatttattttctttagatcatttatcactatctgaaaatatcttgtatatttatttatttacttaaatttttatccaaccacaacctccaccctcacctaaacataaaggaggtctcataaaactaatgattttatttatcgtgtttattgtcatgtttattgcctagcctctaagagattatcaataaatatttgagggagaatatatgagaaaatagtaaataaatggatgcatattgcctgggaccaggcctgaatttgtagataaatgtctatatcaattaatttacctcctttatcacaatcacagattaaagtctgtgatgttataactgttcaaattcttcttcaacagaatatttttattacttggaaggatccaaagatgctctcctttgtggtttcagcacagattcagggtatgtaatatttgttttctttttagtctaaaggctgaaagagaaggaaaagaatgttcagtcagtttgcaaattagtctttgattctatattgctttttatatatttcatggtattatttgactcattctgtcccacagcaaatccagtctttaaaatgttcacagttaatgcatactcttgaaagcaagactttgagacagtgctcgaattaacacaagacagaagtcatataaatcttaagaaggtagaaaatgttacttctagaaaactccaccaaaagttggttggataatttcaggtcttctttctggaaaacgaagagtcacaaagtctatttttctttctactcccaagttccactcattctccaattaaatgtgactcataggtgactgaatgtcatgttttggccactctaagcaaagggattccttggacttgggtacacatattttaagaatattgtatatataagaatattgtatatattcaactgtccatcttgctgcttctctcttacaccaacttcattttgtagcatcagctgcataagctcttgcttttccccctatgcagacatctattcatcaggctctgtgtacactggcaacataggaataaactggataaggttgctgttcccagaagaatctcagaatattgtatttatttaatggcatcaggaaaaaccagtccaccaattttagaaagaaaaaagtcttaaagctgcacatttttatgaacttagacaattactatattttgactattattgactctaatctattccaagaattatacagacagaaagagctttggtaacagcctacatatcaatatttactgaaccaagaactatcacaaaacgtctgttgaaaatttccatgttttaatgatgatgatgctaatggcagctatgatttattaaacactttctatgtgcaggatgtaagctaagtaatttgtacacattatcttatttaaacttattacaagtcttattttcttgaggtagatgttattatcctattttcacagacagacttatgccttgaagaatttggtaaagtcactaagtagtcagtagccaaatcatgtattcttaatccttattcaatattgtccccctatagaagaaaccttgagtttgtaacttttcagtaaggctatttagcttgtgtcctgaagacactctcacctataatgttctttctcgtgtgtagtcagtgtccagaggggtacacctgtgtgaaaattggcagaaaccctgattatggctacacgagctttgacactttcagctgggccttcttagccttgtttaggctaatgacccaagattactgggaaaacctttaccaacaggtgagtaccaagagaaacatgcattgtatttttgaatggcatatgtacctggtgtatgttaagagcctgtattaggaggttttttatttatttgagaatggaggaaactctattatcttattaccaaaattataagtgttttactcccatcactaataatatgggtagttctcgaatcataaataattttcttatcttttctgggcatatttaatctctagatctctcgccttcctgagtatatcatcccatggggtcctagttaagtaccaggacatactgtaatgttttctcaagctgctcctgcacatggactgttttccatgcgtgcttgggatggcctgaagagaagaggctctctgatgttcacctgctcaccatgttttatttttgaactcctatttaaagttaaagatgcaattcatttctctaagtttttctctcccaaatcaattgctcccaactgtagacttccatgattttttgtattttcttccatttatatcattgatctcttgtattgcaagtggtaattcatgtggctatttcctctaacttgaatgtgaacctcttggggctgtggtctccatttacttgtatagtctcagcagccaagccaaaaggaaggagaccaaaatgattattctatagtacacataacaatgattcacttttctcagaatagctgcagatctgtttttttttcttttttggcctattttatatttactttatttccgagaatattataaatgaattcggaaattatgtaagatgcactttacagcaaaaatgggaatgcaaatattttttaaatatgcaagaagtggtcacctttactcaaaattaaagaaacacaaataaaaaaattaaaataatttttcatcagaggtaagacttatttttcatttaatatcagttgatactatcctaaattcactttaaaatgctttgtatgataaaagtatattacattatacaattattaatagaaatgttaattatcttataaatttgtttaagttacttgtagattcttaatattagacctttgtcagatgggtagattgccaaatttttctcccattctatagtttgcctgttcactctgatgttagtttcttttgctgtgcagaagctctttagtttagttatatcccatttgtcaattttggctttggttgcaattgcttttggtatttttgtcatgaagtctttgcccatgcctatttcctgaatggtgttgcctaggttttcttctagggttttcatggtttggggttttacattaagtctttaatccatcttgagttaatttttgtataaggtgtaaggaaggagcccagtttcagttttctgcatatggctagccagcttccccagcaccatttattatatagggaatcctttccacattgcttgtttttgtcaggtttgtcgaagatcagatgcttgtagaagtgtggtgttatttctgaggtctctattctattccattggcctatatgtctgtttgggtaccactaccatgctgttttggttactgtaacctcatagtatagtttgaagtcaggtaggctgatgcctccagctttgttctttttgcttagaattgtctttgctatatgtgctctttcctggtttcatatgaaatttaaagtagttttctaattctgtgaagatgtcaatggtaatttgatgggactagcattgaatctataaattactttcggcagtatggccatttacatgacattgattcttcctatccatgagtatggaatgtttttccatttgtttgtgtcctctcttgtttccttgagtagtggcttgtagttcttgaagaggtctttcatatcctttgtaagctgtattcctaggtattttattctctttatagcaattgcaaatgggagtttattcatgatttggctctctgcttgtctattgttggtgtataggaatgcctgtgatttttgcacattgattttgtatcctgataccttgctgaagttgcttatcagtttaaagagttttggggctgagatgatcgggttttctaaatatagaatcatgtcatttgcagagacaatttgacttccggtcttcctatttgaataccctttatttctttctcttgtctgattgccctggccagaaattccaacactatattgaatagcagtggtgagagagggcatccttgtcttgtgccagtttttaaagggaatgcttccagctttttcccattcagtatgatattggctatggagttttcataaatagctcttattattttgagatatgttccatcaatacctagtttattgatagtttttaacatgaatggatgttgcattttattgaagaccttctctgcatctattgagataatcatgtggtttttgtcattggttctgtttatgtgatggattacatttattgatttgcatatattgaaccagccttgcatcccatcaaaaagtgggcaaaggatatgaacagagacttctcaaaagaagacatttatgcggccaaaaaacatgaaaaaaagctcaacatcagtgatcattaagaaacgcaaatcaaaaccacaatgagataccatctcaagtcagtcagaatggtgattattaaaaagttgagaaacaatagattctggtgaggctatgaagaaatagtagcacttttacactgttggtgggagtgtaaattagttcaacaattttgaagacagtgaggcaattccttaaggacctagaaccagaaataccatttgacctagcaatcccattactgggtatataccgaaacgaatataaatcattctactacaaagacacatgcacacatatgtttattgcagtactatttacaatagcaaagagatggaatcaactcaaatgcccatcaatgttaaattgtataaagaaaatgtggtacatatacaccatggaatactatgcagccattaaaaaagaatgagatcatgtcctttacagggacatggatgaagctggaagccatcatcctcagcaaactaatacaggaagagaaaaccaaacactgcatgttctcactcataagtgggagttgaacaatttgaacacatggacacagggaggggaacaacacacaccggggcctgttggggggtgggaggcaaggggagggagaacgttaggacaactacctaatgcatgcaggtcttaaaacctagataatgggttgataggtggagcaaaccaccatagcacatgtatacctgtgtaaccaacctgcatgttcttcacatgtatcccataacttaaacatatgaaaaaaagctcatcatcactggccattagagaaatgcaattcaaaaccacaatgagataccatctcatgccagttagaatggtgataattaaaaagtcagaaaataacagatgctggagaaaatgtggagaaataggaatgcttttaaactgttggtaggagtgtaaattagttcaaccagtgtggaagacagtgacccagcaatcccattactgggtatatacccaaaagattacatatcattctatggtaaagacacatgcacacatatgtttattgtggcactattcacaatagcaaagactgggaaccaacccaaatgcccatcaatgatagactggataaagaaaatgtggcacatatacaccatggaatactatgcagccataaaaaagaataagttcatgtcctttgcagggacatggatgaagctagaaaccatcattctcagcaaactaaaacaggaacagaaaaccaaacaacgcatgttctcactcatgagtgagaggtgggcaatgagaacacatgggcaatgagaagatcatcacacactggggcctgtcggtggtggggggcaaagggaggaatagcattaggagacatacctaatgtaggtaacaggttgatgggtgcagcaaaccaccatggcacgtgtctacccatgtaacaaacctgcacgttatgccaaaaaaaagaaaaaaagaaaaaaaaatctctgtaccttcagtttaattttcctctaatcctaaaactattttgaaaaaaaattctattttaaaaagcaaagaaagcgaaaaaaaaagttaattgaaaatacctatgagatgaataaagtaattaaataagaccatctgcctagtgttaacattcaatgatattattaatatttgatgataaagaaagaaaagatagaattttaacagtaaaagggactatggatatcacctgttcctaaaatttgaaagtgagcaaaggatttaattttatgagtaattttcagactgtaggaaaaaatgcatgatttttatactactacacttaataatcaagaatcttacatgactttagtacaagcatattacattgcta

SEQ ID NO: 663 - DNA, 20 bp, Artificial Sequence
  Synthetic Sequence
tccatccaggcctcttatgt

SEQ ID NO: 664 - DNA, 20 bp, Artificial Sequence
  Synthetic Sequence
tcttttcatcctgtatattt

SEQ ID NO: 665 - DNA, 20 bp, Artificial Sequence
  Synthetic Sequence
tgaaaagatggcaatgttgc

SEQ ID NO: 666 - DNA, 20 bp, Artificial Sequence
  Synthetic Sequence
tgtgaaatggacaaagctct

SEQ ID NO: 667 - DNA, 20 bp, Artificial Sequence
  Synthetic Sequence
tcccccaggacctcagagct

SEQ ID NO: 668 - DNA, 20 bp, Artificial Sequence
  Synthetic Sequence
ttcaatgagggcaagagact

SEQ ID NO: 669 - DNA, 20 bp, Artificial Sequence
  Synthetic Sequence
gatggaatcttctcctggtc

SEQ ID NO: 670 - DNA, 20 bp, Artificial Sequence
  Synthetic Sequence
aggaatgtccccatagatga

SEQ ID NO: 671 - DNA, 116548 bp, Homo sapiens
accatagagtgaatctcagaacaggaagcggaggcataagcagagaggattctggaaaggtctctttgttttcttatccacagagaaagaaagaaaaaaaattgtaactaatttgtaaacctctgtggtcaaaaaaaaaaaaaaaaaaaaaagctgaacagctgcagaggaagacacgttataccctaaccatcttggatgctgggctttgttatgctgtaattcataaggctctgttttatcaggtaagctgacaaaacatttcattatctgcaccatagaacctagctaccaggtcattttccttactttaaaatcatcttcatgctgctatttttaacccagtgttgtttaaatgtaaattacaggaaccaaaggcatcgtttgatgtgtaaactgcttactatttctttatctttcaaagaaaatagagcctgtctggaaatggtgatttatggtacatactaggcatcaatggtcttgtgtttttgtagatgcttatgattaattgtattcagaaaaaatattttttattatacttaaagctagtctaatgagtttcctggctgtatgtcatctatttaaatgcccagtgtgtccagtattttttaaacataaatgtatagtgaaattggaactatcattcttgtgctttagttttttatttaacagctttagagaggccatgcatatagggagtgataacaatatagaggtgtttggctttgtgaaatacactatcatttttctctaaaatctgttttcatagagaaaagaacaccaatactaaccatttaaaagaggttgaaccttcaaaaaataaaataatctctatatgttccataatatgctacttctttatcctttaatatattcattttatattaaatgtttaccttttaatttattgatttaaagattattatatattcttaattgttctataagcttgatagattgctgtttttctgtatatatttaataactgtttatttttattaattaccaggaagaaccactggagccataaaacaataatttactttatctatgatccatattgtctgtagttgtatttagaatattctatatcataaccataaatgtttcattcagttagccaccacataattagaataagaaattattgacagaaaatctatacatattaattgaaagataagttttaaaaatcatacagggttttaaaatacacaacaggtagtataatgtggcttatgaggacaaagataaaggcataagtgcttgtaggaatttgcatggaaacatttcatcacattcactccaaatagagtgtgccctatatgaaatgaagacttctgatttcaacagggcttccagtcagtactggctaaaagggcttcaaaaatagaacttaaggcctccaaactgtaattcctaatgatatgttgaaaaatattgacatctcacttaatattttacattgagtagcaataatagtccccccaaaaacatttcaaaatagtggttgcctgagaggagagccctgggtcttgtctatttcagaagaattcctaccataggagataaagaaaactatttctttggacagggttcccagaaatggctgttaattaacttgagtgtattgtacacaccatgcttctctacaggtgactaaatgtgagtaactttgttctgagtaagcatcagagctggtcttgattgaactggtttacatttatgaatgaatgcttaattttggccccaaatgttagcttttatttttcttggtatagttgcaacagtctcttagttattcatctatacatgtggtcgccatgtgaaaaagcaaatacactcagagttcttcacttcacaaaatgcgctctttcaaaaatttcggaaattaaacctgctttgattaaatgatatatcaaacacatttgaataacttactctttaaaagaatgtagtggtgatttcatttgtaaagttgagaaaaatgctgtgatttatttgagtactgaagataaaaaggttgaaccctgagctgaaagtcttgggatctggttcatgttctgctactagtgagttttgttgtctcagaaaagaccccaagtatcactgaagagcattttccttgcctacaaaggaaggaaattagaatcaaagctgtataagaatactttgtttttaaaattttctgatcctcatttatttggatttttcttcagttggtttctcagcttaattaagatacaactttgactctcactgagttgtaaattatgattgatgtgctaaacatgaaagtggtaaaatagagaaataggggcgtttcttggccagttccttctgtagtggaaacaagcaggaaacaacatggagaagtggttaagagcaagagcttggcaggttacattttatggccactattacctgacaagttatttaaactctctgagcctttattacatcatctttaaaataggaataataatgcctgtgttacaggattgtgtaactaaaataatgtctgttcagtgcttggtatagatcctggaacatgattacgaacctccttcctctctctccctgccatcctaactcacatcaaaaggaacaggacaaacataaaggcataaattttcatcattgttattattgttatcgttagtgctggtgatataatatcttccaccacaacaggaaggatagaataaaactgccaaataattatgtacctgaaaagtgaataattctcatcctggaaggatgcccttgctgaaacaacaacaattgtgtacctataatagtatcacttagtgttaacattccaggcaattcctggagagtttatagaactcataatgccttccagaagacagttatttatgcccaatatgttatcacggacttcaaaactttcttcttcttatgaaaatagaggcaaagggccttatttcacgttgccttaagaggatatacctgttagacgaagtttctgtaaagattcacaaagggaatctaggtttcaccaaaaccacatttaaacgccaagtaatttctactaagaccaccagataactgaacctaaatctcaggaaagtctttgctatgtgatcaactcacaaactctctaatgcttcaattctattaacggtacaataagatgtggaaaggcaaattgtgcttgatgaatggttgatggactgcaaaatccctgctttcctccaaaggttgtttctaagtgtagcttcgtgctcctgacagctgtgtgctactggggtctttgggagctagaacttggatgacctttcagcaccccaggcctcctaatccttcccttcaaccaccctaggcctctttaaactgactcaagtaactgcgctgtcagcttcatcttcatggcagccaagatgacttaatggactcttgattaggcagatctgagagggctaagagcttgggaggcttaaaaatatgagggtagtgtttctcaactagacaaatgcggtgcttggaatttgttgctcatctgtctctcagttctaggtcactcccagctcttacgagttcttatctttagggttgatgataactaaaagcatccataagaataagcatttaaagattttttttcaccaagaaattaacacttgattatatagtgatatttctttacataggtagctgtgaagattacttttttctgattttcatttatgtatagaaacatgaactcactgaaggttgggaattcatgtttcatttgtcacctaaaaatatattattcattcgcaccttaatattaatggttgttttaccagttttccaaaactgtgaggattaattacccacctaccagtgaaatataattacttaactctatttctgtacttttaggttcgttttaaattttcgattaattttaattctaactgctttcattttcaaaatgtcatgcttacgttttaccttataaacaactttcatggcaaatccatatagaacctgacatctgaattacttcttgaggtagactgaacaattgtaacttgaggtagttagaaaatttggaagaaagaaaatcatattcttgctttatattgtcggttcacacatttatctttgattgagaagctactgttttagttcagctttacctgaaaatatttttccctctgggatgaaattaacacattctttgtttatattttaatgggatgtaacaagtgcagacacctatttcggagcagaatagtgtttcctcttaataatacagcaataaataaaatcttgctcttttactaagcacagacatactttgttttattaacttcctgataggcaccagctctttggatacctaaaatctgaatctacatcagaaatataatttgttaaagtagaataattctttaaaatttatatgaatacctacttaactggataccacaagtttcaatgtgccaagtattttttttttttattactttttttaatatcccacttctttcctgtaaggatttgaaatgataaaggacattctggaaagaactttaaagaaggttttacccaagatctatgaataaagaacaactgaaaagtaacttgcaagcaagtttacaatattaaaatacagcacatgtaaacatatgctgggtgtggttgtataaatgaattttcaggggttttagttcagagaaaccttatgaaatctggagttatttctgtaagaattgaattaggttttcatttttttggagactgcatatagggagcccttcatgtgattaaactctgtgctggagcaaagttagagaaatgatggtcccttaattattaaatagtggtttaatattgttttattcaatgggtgaattcaaagtcactctttaaataactttgaccattttctgccaagaagctcccttttgggaattttaatctcctgattttcagaatatactttattcttactttggttgtacagaacattttgtccttttcctttcccaagaaagagcttgaactggaataattcactaaattccaattcatatttctaacaagtgacattgcgcttctggtctagagtccaacatattcttgcataaggtttaataggacacgttttgtgggcttaagcctctatttgaggactagtcacctgtttgttagtttctctgtctccttggtgtttctgcttgtgacatttatttttctccatataagttgtttttattatgcctaactaaacatgttcccaagtactctgagcattttcttttcatggaatttatataatggttggtcatgaccttaaataataaattctagaagaaacgaacataaattcctgcatgggcaaagtaggtaagagaaagcagtaaagccattcatgttgggcctgaggaactagaaagtgaatgcatgccctttttaaaatggaaaacgccttctcactgctaggagactgttacatcaaatgacttccctgaagaagctgaaaaatccaaattgttagtaaatatttccctctgttgttaaatggaatcatctatttcaaattatttataataccagatagattcaataaaacacatgtgtaggcaggatctggccaaggaattgcaaggtttctttttctccttttgccaatctaaccagtattttcgccagttggggaaaataaaccgcatggagaggaaacctcttgaccatatttagaagcacagctacattggcactcagattccttttctcctagtctaggctcagtctgtttcatttcaaatccttgaatctatgcattaccttcttgatttctagttttcttcccaatattaacatcatcacaatacttagcagcattgattctttttttttcttttttttctattgctattttctgttgctagtgatatcttgtttctgctatgttatttgttgcaatatgtaatattcccacttccactctgttctttaaatactattgaaatttgtttttaaagtttaaaatttagggcaaacacattgccgtcctttacctctgaaagggaaaaatactgttgatatgatatatacatgtccttgagacctgtatggtctcaaaattctaaactgttttattgtcttttgtcatagccaataataactacatttaaaataaatccttccttaatatccgtttttgacaatggccttagtttctactattgatctttttatatttataccaaaaattaatgtaaactattaaattagctttggaagaacaggcaaaaatataattcaccatcatattgtgttctcttacactgacataaagcatgaatagtatgggataagaatataaatcaaatatatatacctggaatgagaacttcttggccagtaaataggaggtaaaaaagaaaaaagcaaaatgagaaaagaaaaaaatagatttataggacctcaccaataaaaatgtcaggagaaaaaaaaaaaacacagctaaagagaaagagatatgcaaacatactgaaagaaaacaaaaaggggtagaacattaacagcttattcacagagtggcccacagctgtggatgcacattagaatcatttggaaaacttaaaaaagagcaatgcttggctccaccttcaaccaattcaatcagattctctgaggcggaatctgggtatcaatatttgcttaaaagctctgcaattgtagttcaaatgtgtagccaggtttgaaaaccaattgactagagaaagacaaagaaaaataacagaagccaatgaaaacttggctagggaagtgaaagatagttgacaaacgcttttcaaaataatttcaaagtgctaaccagcgggcatgtgttaagtaaagatattatgcaaatacttaaggaagcaacaaaaaatacacttgtgtccatttctcccttggttgaacacactggcatttatttatgtgtttaaataattttacatttgaaattgttaatttattatcccaatgatatttgaaagttgattcagctactggttatggtatattttgcaagctaaccatacaaacaatgtacacatttggagctgagcatccataactttaagtttgtacaactatacattcactcactgatttatttcttacttacaaattgctatctggagaactaaatcttgaataatcgaataagagtaggtctactgaaagatattctttgaatctccaaatcaccagttggaagcaaaacactttgatttttaattttttaaaagtgcaatttaggcagatctggaggaaaggcagattctgtaaacgaacatattttttaaagccaaaatgcattttaaaagatattttcagaaaatggcatatctgagaaagaagtgaattaatctaatagtggagcgaaattaataattaattgcatttcttaaaaagaatctcattcctaagatgagtcagcttttaaggagacatttcctgggttaacaccccagttgctgttccggattggtttcccacagctgggtaggagacatagagggcaatcctctacaggtccttcagagaagattatatcctaaagtcttttccctagaggatcatcatttagtattagtatttaactatgctttcttcacccatctctaacattctgccaacgtggtcagtaaaatgattatcataacagaaaatatctgttaaatctcaagatgagaatatccacattttgaggcaggtcgctggtgcttctgtaataaacagaagaaatactggccaaggaattgcaaagttatcatgttcgaggccagggttatgatgaatgtgtgtgacacagtgcttgtgtcctcccattgggattggatcatttatttaaaaaaaaaaatccaacctttatacacaaaggatttgggaagtctgcaatgaaaatataaataagaaaccaatgagatattgataagaatgaaagcctgaaccaggggaggaatgcttttatgaagaagggtcaccttaaataacacaatcagtgcagagggggaataatttatggttgatataaccattcccctctaccaacatgatgacaattgtaagaactagctagattcttttgaggaaacattccaactccttattcaaaagcactttgaacattttgaaaaggaaagggtaaagcatgaaggtaaatgaaaagtggcagagcacatccaaatcaagatgcagattttcatgcaaataaacactagagttaagatacaccatgaaaacaatagtcagctccctcttatgcattggtaaggaatggttttctactcagtatcttaaaattatcctgtcattgtaagacacctttcttttaaatatcccattaaatctatgatagtggtgccagttcagaaaacactgtgagatcaatttaatcagaaaataatacacttcctcctctcccccaacaatacacatccctcaagaaagctaaatttgggaagtttcacacttaacaaaatagtttctatttattctctcaatttatttctcaataaaaattttgaagacagatatttaagacattcaatagggcactcgatgtgggaactcaatactttctgatagacttttctgtaaacctaaaattgttctaaaaaaagtctgttaatttttaaagaggagtgacacttgaagaatgagtgaactcaatgtctgattttgcactggcaattttatcaggatcctgaatcctccatgtccttgaggagacagctcaggtggcacacctggcacacggcagggcatctctccctcctggcatcttccctctcacctcttcttaggtttctcctcaggattactgccctcactagtcagtttcttacttaccaggtcctctatcctctggagggtgaagacagacagaccacgccagtcttcagcagtttggttgctacaatccctgtttaaaacaaaattttttatcatatataattttctcttacctgtggaattctggatctcctttagcctcaaaagaattgagcactgaacagcatccccttcctgtccttatgtgcagagaccttttactctgcattccccgctgcagtaagtggcatcatccacacctaaatcagggcagtgcacacagtcctttgctctattttggtgccaatgatgtgctcggagcctgaaggaaaaacacagattctctgggtcctgaattcagatcccaggaaagacttttttttttcatcttttctttatttcaaagggccctttttgggggagatatggtcaagtgactggtcatatttcactgaaaaccagacttaaagttttctaggtttttcttttaactgcaatttgtatggaatttctcagtaggagattttttatattaccatttcatgaagatgtcatgtgtacaaaattgaatatctagagttagaaaggattcaagggatagttcttttcagcaactgatcttcaagttatattctactcaaggcatttatattatttatcaagaaacagtttaaatttgggctgcagaggacctatgcaagcatctagttcactaaagtcttctaaaaatgaatatatcctctaatagatgtgacacacctacctcaggaacatgatttatataaggtttagtgacccacgttcagggtataagggtattgctataccctcagaagtttctctcagaagggacaaacatttggagtaagcctagtacagagtcccaaagtctggacactgaactagagttttagtgataaaagaggtactacaaattaactggtcaatttcccacctctcccttcttttttactcacataaacacgaaacatctgagatctcatgtgttcaatatatcacacaagtgacagcagagacaagtctagaatagtttgtctgatttgcaacttgtatatctctccttctgttttcctctctcttatcttttcattaaatctcatttctaataaagatagggcaggggcatgtttttctagtatattgcattatcttctgaggcaccatcttggagtgatccactgtgtaacattataactgtgtatctaaggggcctgcttagtggggaaggcctctttatgtgattggttttttgctgatgaagaatcaaatggcagctgaacttcagacacacctaaatcatcctgtgctccagtgtggtttaccatttgcacccatctgaaagcagtgattaaaacctctttgctctgagctagacaaatcccaatcctctgtattttaaatctcaaaggagcgcagataacatgtggagtagtcaacaccgccatcttgaagtaatgtaagtcatacctcaagttcccagttctcaattttcctcaggttgccaagtgaaaaaggcaatcgactctcaacactcagttgtgaaaacagtgggctgtcattttgattacagtcagtaaacagtctgtgtttgcctggaaagaaactgcctaaagcacatggtaccagcaagcagtaggagacatgtggctgagggcaacacatagggctgtctattatggctgatgttggggtaggaaagggatcaaggattgttcagagaatgctgtttgctttatatttgtcatgttgccaatgtacttcaaaatagaaagcttcctgtaatgctgttatattctgatttgcatgtggtttctgctccactgcgcacacagagagagaatgttcacttatggaccaagtagctttttcactatggtgtttcttagaccaaaagacaaaagcagcaacctgactacataaaatagaaaaactattgatccagagacagccccctcccccatgtagaacatctcagaataagggattcgcctcttgcttaattcatgcatttgttcatgggtttgatcccttggaggagagtgatggagtagggaacaggtatatctgaaaaaagcacagtgcgttagaaatataatgagtcccatgtatgtaattttaaatgttctagattttaatatcaaaaaaagaaaacaataagattgattttattaatgatatattttgtttaagatgatatgtcctaaatatcattttgaaatttggcacctacccacatttcaaatgctcagttcctcatgtggtcaatggctaccacgttgaacagaatgtttgcaagatttgtttgggcaattgtatccaccatatatctgataatgccctgcttactgtggtaggtagtcaatacatccttctcctcaaggaatttaataataaatgtagaagcaataaggcacatcttcaataacaacagaagatagaatatatataattactgtaaaaattttagtaggattttaagaggtgacagttggtggtcaatgatatttcagacagcgtgaacatttttgaacgccagatgtcagaggctgaggtcttttaaggaatggaaatatacagagtatgtaagatgtagctggagaggttcattggtaagatcattgtagagaggctttgattaattttcccaaagaaaaaattatagaatttgatggcaacatttactagtcatgtgaccttgggcaagttacttgtcccctctgaacattatagttttcttatctaaaaaatacaaacaacaatcatgtttatcttatatatttgttatgaatattaaatgaagtaatcagtccctgataagtgaccagtgcttaatcactgttctctattatcattcttacttcctaagatattttagagtgggaaatactttaggtaaagtattcagtcttcaatttgctttgttttcaagagagtctagtaaacttggcatagttatataattatttttgaggtaaagaggattgtaatgtatgtattttgatttagattaaataaggctacataattaataaatatagtgcctataaagtttgactttgtttttcctatattgagtccttttatgttttatcatcttaatatctatataatacaaaacaaagttatctgatttacttaatcaataccccattagtggatggtttcattttttctagacattgctattataaaatatgttgccataaatagaatatgtgagtttctaaagattgggctgaatttccaaataataaatctaaaaaaaaaaactactaaatttttcagaaaccaaaattaaataattcattgatttaaaaaagtattcattgagcactactatgtgcgtgtactgttctagacacatgagattcattggtgaaaatagaccccaaaaaggcaaatattccagcccctgtgctgtttctgtgctatccaggagagacataaaatgaataataaacattataagtaagttatatagtacctaacaaaatgataagtgacttggaaacatcagagcagggtaagagattagaggagaagtgtgagcaggtctctttaagacagtaaacttttggccaagacttgaaggagatagaagagttagtcattcagcttcctagaggaagagcatactggaataagggaatagtctgtgtgtgcttccaggtacagaggacagctggaagccagttaggctacagagaactgagggaggaggagaatagaaggaggtgccttccactagataaccaaaaggtcagacagattataaggccttttaggcaattgtaaggatttgggactttttttctgggtagcttctgggggcttctgagcagaggaatgatatgattcgatttctatgttctcaaatcactctgacaggcaaggtaaaaacaggctatatgggagtcaggctggcagcagggagactgaaagcaattgcaggcttctgtgtaatactgctgtaaatcatttcaaggttccaggtgcagcgaaattacaccatagggcatcaaatgaataaataaatgagactgaagaagctatgattgtcatctttaagaaactgcaaaaatgaaagtgatatgcccagtatacatgtttctaacctgaaaaaaaaaaaaaaaaaacaacgtaaaatcctggattcaataagctaggtattgtcaaagtgtggttcctgggctggcaacatcagcattatctgtgcatttgttagaaatgcaaaattgggtcccagccatatatacctggggtggagcccagaaagctgtgttttaacaagaagttagcccggtgattctgatgctaaattttgagaaccactgctttaaactaggttgatgaaactagatggcctgaaagattattttcaatgttaggatacagtgcttccaagttcatttcttaatatttatttttattataaaattaagtatagtccttgagaaaaaaatggtttataagaagtatagaatcatgctaaagaatgaaaaagccttttaaatcacatagaggaacttgatttttatttattatatctcacctcttctaaaaagtgatgcaaagttttatatatatatatataaagttatatatatataaagttttatataaatatagttatatataaagttatatataaatataaaatgttatatatataaagttatatatataaagttatatatatatatctttgtgcaataggaatctcaagacaaggaaaatggagaaaatgtatgtgatacatctgttaaggactgtaggctaatgaatttactctttcaaaatgtacacttagctctcagcctcctgagctcaacatttttaaaggaagaaatgaattttatacaacacaaagaaagaaagaagtctcagactttaagttaacatgaaccaccacgaaggtgatcgaagttactacaaggagaatctctggagctccccaagaactgaatggacaacttggcttcctagacaacatttcaatatttcaccctctaatatcttggtgatttgcccatttgaagttacctctttcatagggacctgaagtcttaaaaccaagtgagcagatggtaattgagactgttacctcatcacagaggttgaaaagccaaccacattcccacctagatggaaagctgtcccttcctcatggcaaagcttgtgagttcctccatgaccacctttggatctgcttctgttcttgtgcaaaatgctgaacagccagaattttacagcctactgcatgacacaaatggttgtaacctgaaaaattcttaagcaggtatatcatgtcatcagtataaaggaagataaaaacaattgaaagaaaataaagttgcttccatggccagagataaagagtaaagatgcaaaatgatgctaaaaaataatggagccatagtaagacaaaaattttacaacactgggaactagaagatcttaaaggataaataaattttcaggataaactaaaataaccacaaaagaggatacaaacttgcctctagaatattcaattgttgatattagcataagcattaataacaatactaagtagaaacgggttaagaaaaataaaattaaagatttaatttgtctaagattcctcagctggtgacatctagcatttttagggtaaaatttctatcatgctgtttgagctatcacttccttatttgaaaaccaaagaatttctcctaaattactaaaatgctgaaattttattaagataatttcaaatgcaggctaaccgtttttgggggatttccagatccaataaatgtattaggtcatctgaaagcaaagtttctggaccatcttatctcatcaccttctaaatgaaattcacttagtttaactaattgcaaccatcagagaaagacttttttgcatcttgtacacatctgtgcaaaataaaatttaagatgtctgttgagcatgttgcctcatgtcctttatactatatcctaaacaaaatttccacccttcagtttagttcttgaaaaatgtttgctttttatatacaacttttaggaaatgtgtttgttttgttttttcctaaaatagaacaaaattcatgtgatccaatatgcttcaattttttcttagttactggggacattacaccaaaattccaggcttgattgccaaaagcactcagatcatattctttactcattcctttagttcatcctttctcaaatagtcatccatgcatcgcttgcacaaaactcacttagggagtgtattaaaaatgcagatccctcgaccctacctcagacctactttttgcagaatctccagaaattgaatccagaaatctgcatcttttacaagtagcacaagtgattctttttttttttttttttttttttgaagtggggcggatggaatcttgctctgtcacacaggctggagtgcagtggcgtgatctcagctcactgcaacctctgcctcccaggttcaagcacttctcctgtgcgtcagcctcctgagtacctgtacctgggattacaggtgcacaccaccacacctggctaatttttgtatttttagtagagacggggtttcaccatgttggtcaggctggtctcaaactcctgaccttgtgatccacccgcctcggcctcccaaagtgctgggattacaggcgtgagccaccgcgccctgctgcacaggtgattcttatgctcactgaagttcagaattgcttagagtccaattttatataatagttaatttgtaagccagggctgcttttaaaaataagtgagatgcaactcttattaagatataacgcagtttgaagtatgtggcctaaagtgaagtattaatccacatgcaggaatcactgcgatttcccatggatacttgggattgaaaaagaaaaaaaaatactctctcctctttgaagccaaggccataaaatatattttctccaatctgtaaatcagtaattttcataagggtaggaaaaagaaagataactcaagcaaatcagaaacttctgggatgctttttcaaactccacccttctgctcctccttattccctcttcgatatccagccctccctacctcatccccctccacatcccagcaaaaagctctcaaatattttaaaaatgtattgaaattgatgttttggttatttaacatacttaacatcatgttcattatagctcaggatgaaggtcaaagtatttaaaacttagttacttgtgtactatgaagacaagggaaataacatttattaagcttgtggctgtgaagtagagggaactaacatttattgaagaattataaatttatgtaacaatctattgctcaatttctgatgcaaggtgtgtcttatgggtattattattagcatttgtgttattgttaccacttggtgagaggtaagagaagagaggcagaggccagatcatgaaggcacttccatactttgctaaagtgattctgagtcactgagagccactgacagatttgaacaagggtaggatatgtgttttgaaaccatcactccggtaacagaatagagaaaaaaaatgatggcttaggagagagttcatctggagacaaagattgtatagaccatgtataaaattgtaaaagtgagatttaatgtttttttgttatggtaagtggccaagggaaatttactggtgagaattcatgactagtttggcttatgagcattgtataaatgaattgcagtaaatattgttttaaatgtcagttactgattttagaattatatatattgccctttgaaattattattattggtttaactctgctaagccattgctgttggttatagcggaaagaagtatgacatctggttattacatttaggttaatatttagcatgctggctttttacctcagcttgtctaaaatatactcttagaagctactaaataggtttatttatcttattttagtaagccaatcaaactgggttttaggtggagaggagaaggaactagaaaatgacctacaacaccaatgtgaaccacatgttccactagtctacctctttggtctttgagatgtttgaggaaaagaagcaaaggggaagatgtaaggagggaagaggagagaaggaagcaagagggaagaacagaaggatgctcaggagtgccagcatgccttcagaaagactaaatggatcaaggctgccaaagaagggggagcacccctgtcccaaccctaggatcctggcagtggttcctggtcccattcttcctaaatcatgctagggcatgcttttaacaagggtcaaatatcttgctttgcatcatccttgctttctcgatccagggccataaaaaaaaaaggaataaaacccagacacagagccagagcacccctatgccaaatgtcaaagattataggctaatttcacctgtattctctttctacagagattatggagcaagaaaactgaagccaagccacatcaaggtttgacagggatgagatacctgtcaaggattcatagtagagtggcttactgggaaaggagcaaagaatctcttctagggatattgtaagaataaatgagataattcacagaagggacctggagcttttccggaaaaaggtgctgtgactatctaaggtaactaaacaacttctgggtataagtttgtttttgtggaaaataaactaaaatctctactatttaacaaggacagctgtatcaggaccaaaagaaggcagaggggtgttttcttccttcctctaccagtttgttcttccaaagaggcaaatacatacagggagacatagcacagatgaccttagggaatggaatgatgccaaaggctgttgatgtaagaaagagagattaactcagttttttttttgtttttgtttttttgttgttgttgttgttgttttgagacagagtctctctctgtcgcccaggctggagtgcagtggcatgaacttcgctcaccgcaagctctgcctcccgggttcacgccattctcctgcctcagcctcctgagtagctgagactacaggcgcctgccacaagcccggctagttttttgtatttttagtagagacgaggtttcatcgtgttagccaggatggtctcgatctcctgacctcgtgatctgcctgcctcggcctcccaaagtgctgggattacaggtgtgagccatcgcgcccagcaactgagttttttatatatttttcttttaagagagacattcatcctgtctatttagtaaattaccctggactgtatttactttaaattttattatatttatttggtaattggatctatggctcacctgactgtatggggtaaagatcatccaaatatgtggtgagtacttggttgtgagctggcttctgaattggtcaagtttttgaactgaccaaagactatttatttatttggtgtatcatctgcaactaactagaaaaactgtctaaaactgtcttagtcaagaaagatgtttattgaacagaacaagcagtgcagaggttgttcgggtccacaagctgagtgatccatcaaaggcccaggggtaaatatgtctctgtgacctgccaccctcagtgtgtcagctttgctctcagattggcatctcttctggttttaatttggctgaagtagtgccatgtattttatcccaatagaaaagggtccagaggacagagaatgctatcttctctttgttctctttcttgggagtgaagaaactttttacagacaatgacttgactgaagtcccctcacctttccttggccagaattagatcatatacctggtccttaaacaaagatgggcaagggacttgaaggaaacatctggaatggaatgaatactggggggtcaaacacacagtttactttgcaagcatttaatagaaacattaaagagataataaatccagtgatgctgatttgtcctttaaaatgttgacttaatttttgttactagttagcagttgtctcttcaagctaataactatctgataaggacgaagtcacagaaaatatcaacccctaaaaattaattagttccaggataattatcttgaagatagagatgaacccatgctttttttactaagctttttttttttttcagagccatgacattgagtccaggtacagaaaaacagaaatagatcatctcgttaaatagttaacacatgttggcaatcatgtgtttagctaatagaaacggaacaataacataaagaaggtctagatttcatctgtgtttggctataacgtagtgatacccttgctgtagagttactttctcaatagatttattcagactaatagtaatgctgatttccttgacaacacactgagagcaagaggtacctgacatagaagaagctagcctaggtttttaatttatcatcaaataactccaaagtgtgtagcatacatgtgaaagtagacgtgggttttatgtttgttattaattcattcctgtttgctttatctcctatgtggaaataaagataaggactatattgctacatttcttagattataccactcattcctgacacagggctttatacatagtaacctcccagtaaggtagctgatttatcctaattttgtttcagcaaacatcaagaatcttctcattttgcaggcttaggtacctaggcttttttttttttttcttttttttttttttttctgaactagacaggtttaaatcttggctccttgtcttatctagtctacctgcacctaagcttcttgatctctaaagtggaaatattaatggtatcaacctcatgaaattgtaacagtgattaaatgggctaacatgcatatatggcatgacagtgtctgagatatagtaatcattcaatagaattttgtttattgttattcaatcttcacagccccctgattaaggtgttatttcaaaactattgaaattatagaaaatagtatttaattctgccttggaatgtgtccagtggttatcattataatgtgctgagtgctctatgtatgcctttgataaatcttatgctgttgggtgcatatgctgcctgagaatatatggtaaataacagacaatcattagctctcagtgaaaatttcactgggaaaaataactaattttcttcaacaggtaattcatcggtcaatcttgtcttttaccttatacccttactataatagtctcttgtagataccaagaaaatacagcatccctcctcagtaatggacccagtccttcacagcaactcacactctccttctcaaagacgtgaaaatacattacagatttttttaatgctatctcaagttgtatgacatacagcaactttccatccataaagatgaaaaatttacagccttctgacacaatcttgtttccatggaaacagaccagaactaatcgattttgactgcaacacaatcataaaaatcccgacagagagagggaaagagagacactactaatactacaggttatggaccaatacaatttgccaaactgtctgctgttctggaaaattaggcaagatgagaacccataggccatgactaatggaaaaaaataaatttttccttagtaacaccacagcatatccgaaatgtttacaatgctatttttctagattctgattcattaacaaatattagtcttgtactcattgtattggctggcttcaagtactttcataagattatgttagcatcatagtacactgataggtgaggctagaaaactgaaatgaactagtcaaatctatttttctgtagttatttatatacagcttagatcttttagagcaaatcatataatagtaagattcaagacaaatatgtcaactataatagaaaaggtcataatttgtgtttgtcagtagacattttagaggagattacttagcttctttgggactgttcttcatttattttacaggcagagagttggactaattgttaaatcccaagtatgtcttttaattagcatcttggaaattcctctttggcatctaggtaattgttctaacttcattgtctatcatcctctctgttccctttacttaaaaattggtagttgtgtgagtcttgcctcttcactcatcatcctttcactttttttccttaggcaatgccgtgaatattcttagcttcagcttcaaccagtgactgctcttttctttctttttttttttttttgacaaggtcttgttttgcagcttaggctggagtgcactggcaagatcatagctcactgcagccttgaattcctgggctcaagcaatcctcctgcctcagcctccaaagtgctgggattacagtcatgagccaccatgcccagactcatccagtaacttcttaatcaactttacccgagcccagacagctttctgagtctcagatccatattttaattctatatccagatgtctcacagctatctcaaactgaacaggttccaaacagaatttattatcatgccttacaaacctccatttctctatttgggttaatgtcgatttgtggcttaagctggaaacctggaagtgagcttaaccctataactttaattcacatctcctatcaagtcagtcacaaaatctcattgtttttctctctcctatacttgtgcattaaatacactcctctggctgtggtttttctccctaacttattgatggcctactattaatgtattccaggcactgtgctcaccctttaggttcattttctcatttaaatgttatattagctctataaagtatgaactatgattatctccattgtacagctagggaaattataaagaataaaaaagcttcaggaacacagcagagtcaggccttgaatccagttctgatttctaagtccatgccttttggtaccagagctatagtcagatcttttacttctcttcttttgactattgagtggtgactaactgctttcttctagggcagttgttctcgaagtatagattttagacaactggggattcctggggccctttgtgtgggagctttgagctctaaactactttcgtaataataccaaaatggcatttgtcttttttcactgttttggcacttgcactgataaagcaataggcatgtgctaaaactgctaatgctttagcaggaatcaatgcagtagcatcaaactataggcatagtctgcattttcttcattgctgcacactctcagtaagaaaaataatgccagttcacataatacatctctgatgaagcagtacatattaatttcattcaagcacaatcctaaaaatacatatttttaacattctgtatgatgaaataggaggaatatataaagtatttgactgcatactgaagtgtcctagttgtctctaggaaaagcacttgtgtgattgagtcaggagctgaataagccacttttctttttttcatggaacaccactttcacttgaaagaataactgacaaactatggttattcagacttgagtattcggcacacattttctcaaaaatgaacaaagggaaagcctgtcacttcaggaaaagcaaatgacagcatttgttgtcaatgtcaaaattcgagctttcaagaggaaattggaatttgggaaaacttttacctgccactgggagcttgacagcctacccatacattacaacttttctcatgacattagtggtgatagtaacaaatgcgatttttggatattatataataaaatttgtcaaaatctggaagaccttcataacaatgtgccattttccaaataattagtgcatgattaggtaaaagacttattcaaaggacaagataaatcaaaagttcattgatatggcttttgatttcacacaactaatttaataaactaccatttgtagagttttgacgtgatattaaagaaggatattcacagttacctggaaaggcaattaaaacactcccttttccagccacacatatgcgtgaaaattctcttcatatatttcaataaaacaacatattctatcagactgaacacagaagcatttatgaaaatctaaatgtattctcttaagtgacatgaagatatttgactaaatgtgaaacaaattcttctcattaaatttttttctgttttgaataatatagttgttttcattaaccatctattgtctgtataaacatacaagtgcttattattagttaataagaatttttacattttttcattttaatttttaatatggtaagtatggatagctaagtcccccgataaacaaaagttctttgggttcatgaatgattttaagagtgtaaagaaatcctgaaaccacaacatttgaaaactactgctctaggatcactccctgcctgtccacgcttcatactgccaccatctttccaatcttcacattgatcataacactccccatccatggcatactttcgtgtgtagtacagggtcctcagtgatctatcctgcctaactttagagttttatgtcataccactcccttctgtgcagggtgatgtccacccataatgaattgcttgtcattgctcccaaactctccatgctctttcttgtctctgcatctgcacacatgccacccccaccccacctgctcaatgtgtctctactgatgtgtcttcctaccaatcctttcccaaccactaccaccataagaccccaatcaaattccaactagcctacaaaacctactccaatatcacttcctcagggaaatttctccaaaccatacctctctctcccttccctgggatgaacatattgatactttttatgaacttcagacaataaccagccatatataactgtgttataattatctgtataaaaatctgcctcccacattggactctcagccccagggaagtgaccatgggttcctggttcaaacagagtactgattcgtagaatccctccataaatattttccaaataaatgatttcgagatcctttccagatttggagttccgcagtttattcctcaaatatgatatactgaaccataatctttttactagttaacaaagggatgtatttgctttacctacacacattcatccacaggctttttggtttttagttaaagagatcatctcctaagatttttttcgtatcttttttgtccttgcaaagatagctctgtagaaaatttgatatattaaattttatgtattttaataaattataatgtgcatataatcattaataatatatatattccacaccaaggcatcagtaagaattaatttttaaagtctgctctaatgtgaatataaaattatgtaagaactctgtataataagctcacagagtacaagaaaggagaggaaaaaagtaaaagagaactgcgaaagaactatgagggatttccaaacagcaaaattgtcattgaagccatgagaaactctactcactaaattctttaatttctcagcctacccaaatattgggcaaaccctaattctcttgcaggggaaaagctgagagtctggaactagcctatcttccgaggacttagagacaacagtatgggaatttcaacgagacgtttttactttcttttgaccaagattcaaattctttattccagcccttgataagtaaataagaaggtaaaggactatttatttgtaaaaagtttttcatgattttgtgatggcaccttgttccatatcatctcagataaatcagaataatttgtgaaaattactcggtgatttccacattagatattttaaacctaatgttatttctaaaacaaaaaccaaccaggagaatccaattaagtaaaatgtatgtattaatataaattagctattcccatctggaaaagggcagccatttctgtgttgaggtgcctcaatgatactgaggctgagacaggttagatgatacaggcataccattagcagcagactcaatactaacccagatctcccatttcaattgcagtgtgtttttcattcattgtcaataaagacatcaaaattagttcaaaaccaaatcctcaaatcaacctttttttttttctcctctaagaaagcgaccgtgtttcatagaatttccttaagacatgtttgtcatgctgtttcattttcattcagcactggagaagagccacagccattcagttcatggcaggtgatatcagacagatggattacacatctttaggtacttacggcttgcagaaaatgctcaaactctttctgcactcaaaagcataaaagctgtgattattccacacagcttagagttggattgatgatgtgatcatcaaaattgacataagatggctaaaaacattagttttattttgtgctgcctcccgtaaatttagaaaacacaaaataaatgatcaactgacttttgagtaaaacagaatttttctcaaacctttcgattcatgtactatacaacctgatggagaaaaaaaaatgtgctgcccaactataaaacagaagttctgttcaaaattagtagagaaaaataacataacttttgacaggcctgctattttattttataacttatatagaatataccttcatagtagcaaaagatataatgacaatgttatatcataaatactaactcaaagaaaagacatatcttacgttaaaaacactttttgggcccagtgcattggctcaccgctgtaatcctagcactttgggaggccgaggcgggcggatggcttgagcccaagcgtttgagatcagcctgggcaaaatggcgactgaaacctcatctctacaaagatacaaaaatgatccaggcatggtggagggcacttgtagtcctagctactcaggaggctgaggtgggaggatcacctgagcccgggagttcaaggctgcagtgagccgtgattgtgccactgcactccagcctgggtgacagagtgagaccctgtctcaaaaaaataataatattataatataataagtaatgttatagaaacacttttttgtcattggaatagatcagggaactagtaattaagatataagcaaaaaaacccccacacacataataagctatattgtttttcttatgttattaatagatccagagcttctgattgtaagctcaaatatatgtagtgagctgccaagaatcagagggccatttagggataaactactacggagcctagaatacatgtgggggcaaaggggaatggtaggaatggggaaaatgtcacagatgactttgatcatgactttggtgccatagtggtaggttcttttataagatgactgatgtacttattttatttggtttgtcattgtttctatattctatctatcttgattttttaaatgtgatttttggcataatgcaaaataaaataactcatatttcgaaatttacatagctgatttcttgtggttttgatagttctattatgtatcctgcaaatagatttttgttcccttccctgagaaattgagcagggccactccatcagtctgccttcccttctttctcatccaggtgatcggcatgtgtgagtgtgcctctatacactgcacttctcagttcattcctttaattccgtagtcacaattgtggttccagcacagcaagaacttgtttaaagagtggtttgaattgtgaggatgcctgaaaccataaaagagggaaaatagctagggaaactgaagataatttaattatgatagtttacaataatatagtgcttactaattccaaaaactattctagacacaacataatcaactcatttattccttatgataacccaggaagtcagtttccctactaccctcattttatagatgaattcaagcaataaggggttactttgtccacaatcacacagctcataagcggcagagccagggtttagaacggacagtgtagcacctgagtccatgcttttaaccactatactaaatggaagattcagggaaaacgtcaaaattgtcttggaataattgaagggcagcatattgaaataaggagtaaacatattctccattgcctcagaaggaaacagagtctggcttaataaaagaaaggaaatactaaagataggtagatttttctggcagcagtggcttccatgtccctgctggttggtgatcagatcttttctggagcagcagttgtcaatgatgctgacaacgagaacagtggttgggtttggcaaaacttcattttctatcctcatttgtatgagtcagggatgtattacaataattgtattgttaccagtacttctttatttggggagttacaaagttatgaaaaggcggggggcaggatgcagaataattaagcaattttattgacaaactttactggcattactcttttgctgaaagtatactatattttggcttacagtgtcaaaacagaatttttttaaatgcttttaaaaaatggacaaaattatagatattcttgaggtaaaatataatgtttatatattatatatactgtacattgtagaatggctaaatcaaactaattaacattaagtacagacttttgatagatttatgaacttggcttattgagaatgaggttgaatgatgatgttttcaagttcaaatgtgtagtgcagtactaaaagcatgacttaatgtttatagctttaaaaagttactaaaaaatgacattttggttgatgttcttatgcccaatcgcttgctttcctaactcttgtgcaatttttcttttattgcaggtaattcgtatgcaagaagctacacgtaattaaatgtgcaggatgaaaagatggcacaggcactgttggtacccccaggacctgaaagcttccgcctttttactagagaatctcttgctgctatcgaaaaacgtgctgcagaagagaaagccaagaagcccaaaaaggaacaagataatgatgatgagaacaaaccaaagccaaatagtgacttggaagctggaaagaaccttccatttatttatggagacattcctccagagatggtgtcagagcccctggaggacctggatccctactatatcaataagaaagtgagtattgattttagacttctaataaatctttaatgaaactcttaactgtaatatacttttctgggccttatatacagcatcacaatttttcttctgttaaagattttataatactcttcactgtcacttatttttatcacaatataataaaacaaacatttataagaaatgaagtcaagagttggttacagtcaggaaatatgaatagatgaatgatttctacaatttcacagtgataattcagatagtcaaaattaaaattaatatcaacaaagtgaaatatctgttatggctgacatattcaagcacagggtagactacagaataatacctgtgcagaaaagaattatgagcatatgttgtacttaattattttttagttcatgactgacttgatgtaccttcacaataatttatattctagaggacaataaataatctgcttagcatcctcctgtagccagacaatacatgaagaagcatgttcacccagagattcctttcccccccagtaacctagaatatgattaggatcttctcttaaccttatatagtttgtggcatgctagattctggatcatgtataccattaaaacatcaccctgaagaaaaaaatgtcaaaattggaagaccaaaaagaaagaactttcaaattttctccatccatacatgatttaaattagtggttatgactgtgctttcctaatgctaaaataaatgcataattgtatcagaattagctggtttctatagttaaactagctgggtgatattttatagaaaatataaaaaataggtggtatactctatgctttctaattggatattaaggcattttataaccacgatttatattttacacttaaaagcgtaaaaatagctcaatgtagaaactaaagataaattagtatcaccatgagttgatgacttatagattatggaagatattaaacacctttattagtcaaagcacatccttttaaaagtttataatttataaaatcaatgatggctaaaggcaatgacaaccattcagacatggaattagtcctgttgttctaaataagtacttctcaaacttgcacatccatacagattacctcaagatgttttaatttgcagattctgaatccataggtctgggctagggccagagatcctgaatttcttacaaatcatcaggctgttacatggccacactttgaatagcaagctttaatgttttatttaaagtcataagactacatgtaaatagctaaacagagtctcctttttccccttttatagctagtttcataaaaggtgacatttaatacattcatgtacttctaaaaataacttatttcaacaatttactatagaattgataaagaaaaatttgaaatgtagttatgatgattacaataagtcaccccccaagaaattggacaaaatattatccggtgaaaactgttgctctgaaggatatgtttgtaaagatatctttaagaaaggaggcatgatttactctgctatgattaaaagtatttgctacttaaagaaaggaagtgtccttaaaaaagagaatcaatcaggctggtaagattaagggggaaacaaaaggagaacaacagaggcaaacgttactattttccaagggagacagaactttagtagtagcactgaaagcattttcttcccaatggccaggccacctcattgtggaggggctacactgaactacctaacacatgctattaaacattccacatcatttgattaggtcagctggcttgggctccatattcagcaagaaaccttctgactacaatttgttttcccctaaacctgcttgaagaaaagaacgtgctcattacatcactacaattatctcagtccatatgaaagtaatgtatctcattgtaaataaatacactggaggccaggcatgatggcccacacctgtaatcctagggcttcgagaggccaaggcaggaggattgcttgaggtcaggagtttgaggctgcagtgagctatgattgtgctactgcactctagcctaggtgacagatcgaggtcctgtctaaataaataaataggttggcattcttattttatatatcaggttttcaagtttggttaatgtgagtctgccactaaaaaacagaattgtcctctgtttttgacaaagtcaatttttattgcctccatggctgagagccagacttagaccctgatttattcatagtggctgtgaaccatcttgcgagacatctagatagtctttacggttggctgcactgctttcgtttatgaagtatccataaagatgaagattgaggtgctattaaacaaggaggtaatttgtcattcttagcatagaaggagtaaagtaagaagctaatggaggaagttttagaatttaaaaatatgttatgaagctgtgttaattatatggaaaaatacaagtaaaaggcatttaaaagctttaaagcattatgtaactctttaccatcattaattagtgatacattttgaatacctaatttaattaaatgagtaatatcacaatgtattttaatggcatttaatttgaccagggtgctattaataatagtgacagtgataatcataactaacttttcttgtgctcatactgtgtcaagcactgctaagttcttgaactcatttactatatagtgaaccagtgaggcaggtcctattgttagctcagtttgtaaatggggaagtgaagcacagagagatgaggtaacttgctcaaggccacactccttaagtggtgaatccaggatctgagtccaggcattcgactccagagccagagctcttaaccactaagtgaaattatatactatgcttattaacataataaaataaaagggaaagttaaaaaattggctgcatcattttttgagttctctgattgatgtggtcctaatcattgagatgtaaatcttattcttgccacaaagtagtaaaacttttagtaaacttataagatgtgcatctaagtaacattctaggaaaaagaagcaagtaacattccagagtacaaaatagctggtttaacatacttccagctgtagcaatgacgatctatctctcccctattcatctgtcattttctcaagtaattttcagtttaggtatatctcttcatatcatcagagccccataatttcaaattcttgcaattctttcactatgcaggacattagtattttattctgcatttctcagaactcagggttctctttgtgtcaggtattgttcctgagacataaactgggattgtagtcttaaggcctgctctgttttagaacctataaattcaacgaagatgctcttagcatgtcagctgtaattccgctagtactacgaaggctaatcttgcaggaggagcaaagggttccatgttcaaagggataatttattgctgttcactctgtttttggagatagttcaaaatgaaactctctcctaatgtcgcaagcagaaattgctttttcagggaaattgtttcaaaagagcatgagtacctgaaccttaaattacggtgagctttttcaagttatgctgttgtgttgctgaatgcctaaatggatcttgactgttcaactgtaatattaaataatctaatcttgtgactccaaggcaaccctttaatgcttctgtgcttcaacaacagtctttccaaggtccactgtcctttacacacagtcctactgctagtaaagaatagtttgcttgcccgcttcataaaactattcacatttatagtgtgcagtttctggaaaattgttagttaagtaatggttggctctatggtcttaaatacaaaaaggcaatgaacagagaaactgtgtagtttctgaaaaatggttagttaaataatggttggcttgatggtcttaaacacaaagggataatgaacagaaaaactgttcagtttctggaaaatggttagttaagtaatggttggcaccatggtcttaaatacaaaagagcaatgaacagagaaattgttttccctgccctttatactgacaatataaatatttttgtctacctactcaaacaaagcatgttgtcagtgaacataaatgtatggcatatagcccctagttaaaggagagaaacatattattaagtaaatggatatacagaatagatgtcttaaaggtaaatagtatctttaaggtaaacccacatttaattaaaacaagtgtttatttgcaaaccaggctattaaatactgtgaaaaaaatggagaaaaagtagattacaagctctttatgctcaatggtttataacaatttctaacctagttctcactggaatgaacactgtgtaaattgctacttgactataattacaagcaacatgtaaaagagtacaaattaatgtactaagacttactggtaaagagaaacaattagggagtgatcaggaggtagtgtgatttatttggaaggacatgattaaggaggtgattgatagctgagaaaattcccagacagaagggattttcaaccttgattgcatattggaatcgcctcaggaaagttttaaaaatacccaaatctgtgcccatccctcagaaattttcattcaattggcaattttaaaatctttacaggacagcctaatattcaggcaggattaagaacctctgacataatagggggtcactgtaggtggaactatattgtaatgtgttgtggagacatttccctgaaatgaagggagtttgcattaaatgacctttcagttgccaccttcttctaggagtctatgacattcatattcagagtcatagggagagtttgactagttgtgagtgaggctgacaactgaattgaattggccatagcaaagatgactctagtgggaaaaaaataaaagatgattctataggaacatggtaaataatcacttgtagcatagctaatactaagtggatgattgtagctttcagatcatagaattttaattgtggaatgccctttgaaatggtgtatttcagactaaatttcaatgcatccatctctcttcagtattagctgagaagttgaacccttctcacacatctatagtcagcaaaaccagattattcaacctgtttgaacattttaaatctacagggacaatcagaagccatcataaactttgaagttaaaagatttgatatgattaaaatacttataaaagattattttagtagcaatgtgtacagagtaatctgaaaagttaccaaagctgaagacagatggtaagctttaaatagagttggaatctgtaacgctacaattccataaaaaaatttgtgtagaattgtcagtttgtatcagcaagttggaaccttagagatagattaggtaatagtaaatagtatctttatttgtaactatatgttaatttaaacatctaacatgtttgtagttatgatatatcaactggtttaaacaaacaagtttgaacaaacaaattctattttttaaaaagttcttcatgtatgtaagctctttaaataagcccatgtctaatttagtaattttactcgtattttctttttcagacttttatagtaatgaataaaggaaaggcaattttccgattcagtgccacctctgccttgtatattttaactccactaaaccctgttaggaaaattgctatcaagattttggtacattcatatccttttaatgtgaattgcctaaatgctatttctaacagttgattttaaagaaaatgtcagttatattttcaagtatctgtaaaatttctttgagattaatggtaacattgttagtttaattcatttatttgcattggttttccactatttataatgagagtattatagaatgactacagcattatagaagaaaatatgtaaccaaccatgatagtgaatgtgcaaaggaaacacatagtaggaaaaagagcaaatctccttacacctttatcagcttcaatgaggtcatatataaccattgctaaagattagattatggttagtattactatttgcattaccaagtgttcaaacttttacgccttaattgtttctgtatcttcagcgcctggatttatccttctttgtgtccttccttccttctttctgtccttcctgtcttcttcccttccttcattcttcccttttcccttccgtcttattcccttctttttttcagtaaatatttatcagactcttactatgtgctcatgtacctggttgagaatatgtatcaaaaagtcgaacttgaaattatttacaatgttagtcaaaaagcatatgtaaaagggcagaatatgtttggatttcaagaaaattctcaagtaatgataaaatagaatggtgattttctgaggcagtgttcaagaatgggaattttgtataggcagattcaaagcaggcttctatataaacttaaagactgattcacctagagacagggcaaatgaaactgataaccttttgaggtatgaattctctcattctatggcttgatgttggaaagtatttatattctaaaataaaatatttatctcaaaataatcataaactttcttacagggaagtctggacttagatcccaagagaacgtactacagctaattctcagaagagcatcagaatagtgctatctgtttaggtataatgtggactagatacaagagtatagccagatggtctgttggggtccgccacaatctaaagtgtaaataaaaagctagaaaataacattaccttatcagcacaaaattggatctccctcttttatgctataaattgtaaaggagtaagttacatcactacaaacctactatttatgatagaattctcaatcaatgtaatctttgattatactgggctctacattctcacactttttacattgcattcgttaacgttttataagtcagtgaggatgaatatatctgaagtacaccttttacacttatggcatactataaacttactaagggatggtgagttcttcttccagggcaatttcacacaactgattggaatgcaaaataacttgcatttgcttcaaatagagatcatttttctattaaattcagttttgtgagtatatggtataaaatgaaaaaaagagtgcaccaaggccatatcacaggctttgaagtttcttattattttatcattgttttaaaacaaataatattaatttcacagtttttgcatcgataaacttttttgtgtgttttggatcatttataaatggccatggtaacctactaacatttattccttaactataatctactttattcagcatgcttatcatgtgcactattttgaccaactgtgtatttatgaccttgagcaaccctcctgactggacaaagaatgtagagtaagtaggaataacttctgggaatgagaaatgcacactcaaattctctagcaatctccttgtgggtatagcctgacttatggtttccacttctgtctaagaaaaagttattttcataatatgaaagaagataagggaagttctttgggggagctattcttctacgaggtaagtatttttccaacaaaatcatgacaatatctgttaaagagaggttataaattagtatatgctttctggtaaactaaaccaatcacctagcctaaaattaggtctcaatcatggttaatcatttgagataaaatacagtgatcagttcagtaatttgatgaattaaattattttattccagtatatagtgattattgttatattcgaatagaatagatttaggtttttagctctaaattaagtagatgtcttaattatacatctaagatgtctaagttatatttagatatgtaagttttttatacacaacatgtgtgctgaaacagcttagatgtgttctgtaaaagaaataaaatgtcttccataaaactgtgttcataaaataacagggcttaggggaaacatgattgggggagagtaaaacttatggaactttgtaactagaatacaacatagaaaccataataatcccaataaaaagacacttgcccagttgattcttttctaatgtttgtacctaaaatcatagccattgagttctttgtggcctcatatcccaggcctcatcctttctcccttgaaatggagactggggatatttgtatgatttcatcaaaataaaatgcttcattctgtattttaatacatggagaaaggtctaagcacattagttgttcaggatgttaaaccaggcccttgttgcactaaaagaaaacacttctgtggatgttgtgtattagtatcaagatctttttattattattattgcaagggattttccatttaagtgtgagaaaaaatgcccttcattgtttcaaaacatcaatatgctggggaaaactgtgcatgaactaacacaatttctttatcgtaacaacattatttcattttcttatttttcagtcacatatgaggttatttgcatcaaagaaacatagtttttagtgaaacaaagtggttatataggctacttatatatagtataatacaataatcaggtatctgactggttaagtaaaaaatgcagtatgctctttttattgttatatttttaaaagtaatgtacaatcggagataagatagtgtaacaaatactgccacttttagttccgtttttatagatttctctgaggatttactgtaccactctaagccattatttgtcagttatttaacatgttatttaaaaaaaaatagtagcttcaaaatgctgcctagaaattattgtaatagagaatccagctcccatattgaggaaagccatttaacttagaactctcatttactatacatgattttggagttaacaaaatggacactcctatgtaagactactctgtatgtggttttcccagcagaaattattgaagcatttaaacatgtatcaatttcatttatttgtataacattattaaaagatagttaaagaaggcagttggagtttgtgaccagcctggccaacatggtgaaaccccatctctactaaaaatacaaacaatgagccaggtgtggtggcaagcacctgtagtcccagctactcaggaggctgagacaagagaatcgcttgaacccaggaggtggaggttgcagtgagccaagatcccaccactgcattccagcctggacgacagagcgaaactctgtttcaaaacaaaaaaaaaaggcaattgaatatacaggcctctctttctaaagaagcagtaataacttagagatgattatacccattatgaaggcagtcttagctttagaaagtttttgatttgcatcattcagctggaaaactttgctcaggttttctgatcaattgtcttcagtagcttgaaagcaagccagcaggaaaaaagcaaagtagtagtggttactaccccaaaccctgggttcagtgaaacagaagataacttagttctgagatgaaaactgaagtcaccgatatttgaaacagtccctgtacaaagatgtggcatacacaaaaccatattatatagtgaggggaatgttatataaggcaaggcacttctatagactgcattttatttaattttatttatactgcattttatttaaaccaatatacttaaaatatgaaaattcaacaattaagattagccaaatttcaaggttttaaaacaccaaagttacaggaacatagacagaattgacagcttgattatgagcctagtgtgggcatagccacgaaagataaaggtcccctgactcccacttacctgcccaacctagttactaataaccatttttgaatacctattctgtgtagagctctgtctcagtaggctctaggactctcttccatggacagccatgaacacttcccatacattccaaatgtacccacatattttcttaatttccccaaatcaagaacaaaagtagggactttaatcttattcctagtaactctatagataagacagaattgcctcagcataaaccacagggcactaaccactaatacaagaaacagaacatacatgtgtggtgtttctaggcctttaaaaggccagctatctctacagacagaaatatcacggtgattatgtgtgtcacacaacgatccaaactacaacacagtaaacataagcttgatattgtaaaatatatctcttcctaatagtcagctacttcatataagtaaagataggaattattgcttatgagatcaattgaattgttgggggagaaaaggaagggaatgtacttaagaaaactagacttgaagatatctgcataaattattcttgatgtctttgttccctcatatgaaagaaacttgtgcagaaaacatttcaaaataatgatcctaacatttttcatatataaatactggtaggctgaaaaatctaatgaatttaatatgagtaaatcaaatctttgtggcttgggtgaagtgctctgaaaaataaacttaaattgtgcttttaaagaacacaatgttgaaaaacaagtactctcaactattttgggaaaaaaacgaaaacagcaataacttatattgtcaagactcaaagaaaagagggctagaaatacatgacattaaacagcaaatagaaaagtcttccaccattttggaggctgaaaattgaatttaagcaaggtttgaatgatttagcccaattgcatagagatagtagctgatgcaaggtttgatttaagaattttgtgtatccgtgtattttggcatttgtgcaaacacacacatataaaatactagtgaactggaacatttcatatgataatatatacacacacacacacatctctatacagcatgctcatgcacacacacacacatacactcagggtgggaggaaggagggcagagagagagaaagaagagagagaaatggggggcagtttataactctacatgattcttaaaaattgaaaaaaaagaaatatattttctatggtagacatgtaaactagccctcaaaatgagtctactcattaagaaatttgaataaaatattttattatttaagtaaatgaatccaagctatgttgcctctaaagttgtactgtctgatgaggaagccactagccacatatggctatggaaccttgaaatttggctaatattaattgttgaattttcatattttagatatattggtttaaataaaatgcagtataaaaaatacgttgacttgcttcttctcatcttttcgcttgctactaggaatttgaaaattacatttgtggcttccattacatttctatcagatactgctgcgctagaaggtcaaactagatgattatccataagatacatgaaactattattctaaaacccaaatagttaaaccagattagattcctaaagaatatattttctcttcagtttaactctttgctcaggcttgtaaaactaactaaatgaatagattatttggtaaatagaagtaaggaacaatattttaatgaattgaaaaaccacaaaaggataggatttgctatgattgaaaacatttattttaacagttcaagcaaaattgttaattttggcttggatgtttttcctaggtacacattcactggaatctatacctttgagtcacttataaaaatcttggcaagagggttttgcttagaagattttacgtttcttcgtgatccatggaactggctggatttcagtgtcattgtgatggcgtgagtaactttgaaaatttgataagcgcaaaggagtgaaaatagtcatagtacaaacaaggtctttgtgtcatatattaaatgtagagctttcttgttagtcaagttaactatatggattgtgtattttaagaatacatattagaatacatattgcaatgtaaatatatccagtaaatgatcaataaatggggttatcttcatgtcatatagtctttctcttcatcaaaatgaagttattcattgactacaatttaatagcaacaactgtacttggattagttttgcaaacaaatgtgttcatattagtgaaaattacattgaaataaagcaacacgattttgtttcttaaaagcaacctttagcatatggcagcctgaggtctatagcaattccatttgttaaactcacagggctctatgtgccaaacccagcattaagtccttatttagtataaactttgccaaaactatcagtaactctgatttaattctgcaggtatgtaacagaatttgtaagcctaggcaatgtttcagcccttcgaactttcagagtcttgagagctctgaaaactatttctgtaattccaggtaagaagaaactggtgtaaggtagtaggccccttatatctccaacttttcttgtgtgttattgtgtttgtgtgtgaactcccctattacagatatgtgacagagtttgtggacctgggcaatgtctcagcgttgagaacattcagagttctccgagcactgaaaacaatttcagtcattccaggtgagagctaggttaaacaccgaggttgactttaattattgagtttgaaatcaatttatatgacttacagcattagccttgttgcttattattacagttcatcccgttaaataatgccaaatgatgtttcaatgtcagtttagctcctaaaattttataaattacatgcgtatttataaagtcagcctttgagtttaacagaaaattgcatgagacatcttcaaaaaatgctaatttgggcctcttgcgctctctctctctctttttcactaccatggctttactaacagatttggattttaccattcgctgcagatgtagttcaaaaatggatctccttttacaaaggagaaaatattattgttgaagagcatgtatatggcatgagacatgagacttacattattttaaaattcttttctcctctaaattactactgcttggaggctagagtaaagaatggattggtggaaaatggctgcatgaaacacaaaatctgaaatgaaaaataactccaagtttttttgtatgtttgttcagcatgtaaaaccacacaaacaaaacttcctgactagatatttaaaccttcatattgaatttccagcaagcacactgttcatgtgtaaaatctgctgttcatctatttcccaaatcatcaggctatccatacagctttggtgtctaaatagtcaagcaatcatttatgggggaaagagaatgtgtgtgactattaagaaatcatgatttctggcactcttcctcaggtaacctatagttctctctctgcaggtttaaagaccattgtgggggccctgatccagtcggtaaagaagctttctgatgtgatgatcctgactgtgttctgtctgagcgtgtttgctctcattgggctgcagctgttcatgggcaatctgaggaataaatgtttgcagtggcccccaagcgattctgcttttgaaaccaacaccacttcctactttaatggcacaatggattcaaatgggacatttgttaatgtaacaatgagcacatttaactggaaggattacattggagatgacagtaagaagtattacattatgttaaccttagtgttgctgaatgaattttcaactataaatagttgagactgtgggtgtacagccacctttgtaaataactgaaatagtccaactctgatttattactaatactaatgtgaataggattaatatgaaataaaatgggtttttttttgtattaacaggtcacttttatgttttggatgggcaaaaagaccctttactctgtggaaatggctcagatgcagggtaagaaacataatatattttttaagatatagaactctttgcgaaaaaaaaaagtaggtaggaaaacaactacatggttatatgtgtagccttaccatgtatgcaataaagagcagtgctgctcccctaggaagtgccttgtctgccttaccggattgccactggtcctaaactcacagcaattaaaaattatccctttgtgaagacctttccccaaaatttcacagttaagatgttcttaaattgatgctccaatgtgtgaaggcccagagtctgtctttgctgtacatctatcagagctgttaggaaacacaggaacacaagatgggcccctttttattggtgtacatatgtatcaatgggatgagttttgtcgtgactggaaaagacccagactataatgtggtcttcagggtggaagcacacttggggaagtgctttgaaatatttaagtattcttgaaggagcatgtatttctgtatacaaagaagccaagggtgcatgtgtgccaaaggcatgtccaagtatcagttgacataatgaatagttcttttaggccacacgttacaacaaaagatgccataatatcttagtcatgctgttattctctaacccttaaatattttcctaagagtattgtaagttaattttaaatcaaaatagggaattttttaagagctgagagatagcaatagtaagtgactcttaggacacggaacttaaatatattttgagtcatcctttaaaaagggaaactggtgtagccataaaaatctaagagagttaatgaaaatgtatactagtcatataaatagagctttggggaattttttttcctgacagttttcctagccttattatgaatgtagggggtaagagcataggttgtagagttcatgtataccagggttcaaatcctaacttcaccacttgtaagctctttgaccttggaaaagtgtcctaagctctctgtaccttagtttactcatcgttaaaatggagagagtaatattctgtccctttaatagttgtgatgattaatgatttaatacacataaagtatttgaactatcacatggacaattgtaagaatttattgtatgtaccagcctaagcaacaaagcaagaccctacctctacaaaacaaaaaaaaaaaaaaaaaaaaaaaaagaaagaaagaaaaaaaagaaaagaaaagaagaagaaaaaaagaaaaacttagccaggcattgtgatgcacacgtgtagtcctaacttctcagggggctaaagtagaaggattgcttgagcctaggaattccaagccacagtgagctatgatcatgccactgcactccagcctaggtgataggctgtctctgaaaaatggctgggagcggtggctcacacctgtaatcccagcactttgggaagcagaggcagggggattacttgaggccaggagatctagaccagcctggccaacatggcgaaaccttgtctctactacaaaatgcaaaaattagctgggtgtggtggggcacacctgtatctcagctactctggaggctgaggcacaataatctcttaaacgtgaaagatggaggtagcagtgagctgagatggcaccactacactccagcctggatgacaaagcgagaccctgtccccccaaaaaatttttttaataaatttaaaaaaaaagcacactctaaaaaaagaaaagaatttattgcctattaactattatttattatgatgatgattaacataaaagcccagataaaattttggataaatttggttaatacatactttattcctattaaaccataataatctattccccttaatgaattcctattatggcttaagtaatttacatcaacagtccccagcctttttggcaccagggactgttttgtggaagacaatttttccaccgaccaagggtggtggtgggaaatgatttcaggatgattcaagcacgttacatttattgtgtacattatttatattattagcatactgtaatatataatgaaataattgtacaagtcaccataatgtagaatcagtgggagcctgatctcaaatgattcacctgcctcggcctcccaaagtgctggggattacaggcatgagccactgcgcctggccattggtgatgagatttttgtttttgtttttgtttttttttgagacggagtttagctctgtcgcccaggctggagtgcagtggcgcgatctcggctcactgcaagttccgcctcccgggttcaagctattctcctgcctcagcctcccgagtagctgggaccacaggcgcccgccaccacgcccggctaattttgtattcttaatagataccaggtttcaccatgttagccaggatggtctcaatctcctgacctcgtgatccgcccgcctcggcctcccaaagtgctgggattacaggagtgagccaggtgatgagttttaaatacaaaaccattttgtatttaagcggcacattccattaaagaaataaatgatttgtattttattaaaattaaaagctgctgttttacaaagatattcttaagagaatgaaaagacaaaccagcaactggaagacaatatttgcaaagcacatatctgatttaaaaaaaaaaaaaaaaagactggggctaggtgaagtagctcattcctgtaatccagcactttgggaagctgagaggggaagatcatttgagcccaagagtttgagactggcctgggcagcatagggagacactgtttctccaaaaaataaaaataaaaaaattagccaggcatggtgtagtgtatctgtggtaccagctactcaggaggctgaggcagaaggattacttgagcctgggaggtcgaggctgcagtgagccatgatcagaccactgcactatagcctgggcaacagaattataccctgtctcaaaagaaaacaaaacaaaacaaaacaacaaaccagtgtccagaatatctaaagaactcttaaaactcaacaataagaaaacaaatgacccaatttaaaactggcaaaagatctgaacagataccccacacgagtatatagtacaggtggttattaaggaggtaaaaaggcactcgacatcatttgtcattagggaattgcaaactaaaacaacaaggagttaccactgcacatctgttagaatgactgaaaaatgtatctggcaataccaacttctgatgaggatgcagaataacaggaactcttgcttattgctggtgggaatgcaaaactagacaaccgccttggaagacagtttggcggtttcttacaaaataaacatagtcttaccatatgatccaacaactgcacttctaggtatttagctgatcaatttgaaaacttatgtcttcacaaaaaacctgcatgtgaatatttatagcagctgtattcataatgaccccaaactggaagtaaccaagatgcccttcaatgaccccaaactggaagcaaccaagatgtccttcaatagttgtatagataaataaattgttatgcccatacaataaaatattactgagtgattaaaaagaaatgagctatcaagatacaaacaaatattaatgaatattaaatgcacatttctaagtgagaaaaagccaacctcaaaaagctacatactgtatgatttcaattacctgacattctagaaaacacaaagcaacagagatgataagaaaatagtgttttccaggggttcatggtgagggattatctaggtaaagcaaaggggatttttttttagggtgagaacctgttctctaagattctataatggtgaatatgaaacttaatgcatttgttaaaactcatagacctttataacacaaagagtgaatcttaatatatacaaattaaaaaaaaaatcttttgtgaggtttggggatcccaggaagaaatggaatatgtgacaaaaatatatacatgtattgcaaaatatgaaatgacctcactgtaggtggtggggtaataacatgctaacctaagtaactttggaaatgagtggagtctgtaagactaaaggtaaaaggaacaataccctagttgataaagttgtttccaatggtagtatagattaacaatcctgaaaccactgtgcatgtgtaccagtactgagcaattacaaacatgtgtatctccttgttctgtcagctgagagggcctagaagcaatgacaccccagtagcaacaaacacagctagcactcagatcttggtttctaataccattttccaataaaaagaactagggctccttggagaaatggttgattctaggactgcggcagaaattataaaagatgagcctggagcatctgatagtacctaaaactaagaaagtgttaaaaaacaaaaaaaaatgcaacccacaaccatggtgtatgtcaaactgttacaggtgtcaactgaaagagcttccagtggccaaagatgaagccatttgaacaaataaatgaaatatcattgaattgtaatccaaaatataaaatgactatccatgactacatgttaattgaaatgattgaataattaaataaaatatgaatggacaaatatcctatgcagaataatttcaaataattttggtatatacttaagatcataactgcgggttccttaaatgtggtctgtacacagtgactttatttcaaagagcacatatggaaaaggaagaaaagggagtaaatttacagtagagaaacctaacactacctcaagacaggtggtgaaagttaacatcaagagtgataagtcatagtgagtgataagtatgtacccttggcatgatgtgatgtgatgacagtgacattttacctctgtagtcttccacccaaaaatccataacctaaatataatcatgagacaaacattagacaaatcccaattgaagggtattctataaaatatctgaccagtaatcctcaaaactgttgtggtcatcaaaaacaagggaagtctgagagattgtcacagccaagaggagcctaaaaagacataactactaaatgcgatgtgtatcctgaatgggatcctggaacaaaaaaaggacattaagaaaaaaactgagggctgggcacggtggctctcgcctgtaatcccagcactttgggaggccgaggcaggcggatcacgaggtcaggagatggagaccatcctggctaacactgtgaaaccctgtctccactaaaaatacaaaaaattagctgggcgtgatggcaggcacctgtagtcccagctatttgggaggctgaggcaggagaatggtgtgaacctgggaggcggagcttgcattgagccgagattgcaccactgcactccagcttgggcgacagaacgagactacatctcaaaacaaaacaaaaaaaaagaaaaaaactgatgaaatctgaataaaatagtaactttaggtaataataatgtattaaggctgggtgcggtggctcgcacctgtaatcccagtacttcaggaggccaaggcaggagattgcttgagcccagaagtttcagaccagcctgggcagcgtagcaagatcccatctcaattaaataataacaatatatcaatattgaaaatggcatggaatgtatgaagcctgtactatcctcatactttttctgtaaataaaaaattgttataaatattaactttattttagaaaattctacaaaaccagctaatgaaatggttgattccccactctttgtctgttttctggcttttaatttttttttttttttttttttttttttttttttttttttttgagtcagagtctcgctctgtcacccaggctggagtgcaatggcacaatatcggctcactgcaagctccacctcccgggttcacgccattctcctgcctcagcctcccgagtagctgggactacaggcacccaccacaacgcccagctaattgttttttttttgtatttttagtagagatggagtttcactgtgttagccaggatagtctcgatctcctgaccttatgatccgcccgccttggcctcccaaagtgctgggattacaggcgtgagccactgcacccggccttaatttttaactattgattcttgccactttgtaaagagtagaaatatggtaatgtcagagccaaaagtgtgtggttgctagctttctgccattctaaatgtccgtaaatatttatttgcatctaaattttctatcggtcttcctagtgaatttcatctgataagtttcacggtgggcaatcacctaaagtgttctggaaattaaagcaagataattcgtcacagatagcagctttgggttttgaaaattcctataagtcaaataaattgaaattgctgtaatttctaaactgaccctacctccatttctctctcttatagccagtgtccagaaggatacatctgtgtgaaggctggtcgaaaccccaactatggctacacaagctttgacacctttagctgggctttcctgtctctatttcgactcatgactcaagactactgggaaaatctttaccagttggtaaggtccaaatgagcatgcataacatttatttttatagacatgtatgaaatgaaaagcataggctgggtgtggtggctcatgcctgtaaccctagcactttgggaggcagaggcggatggatcacttgagtccaggaattcgagaccagcctgaacaacatggcaaaaccccatctctaccaaaatacaaaaattagcccagcatggtggcgcccatctgtagccctagctacaagggagtctgaggtgggaggatcacccaagcccaggaggtggaggttgcagtgagtcgagatcatatcattgcactccagcctagatgacagagtaagaccccatctcaaaaaaagaaagggaaagggaaagggaatgggaaaaggaaagggaaagggaaagggagagaagggaatggaagggaagggaagggaaaggacctgcttataacactctggaacacagaggaaggtccaacataaagcaagtgtgccaggaatcctaattgctcactgagtcagtacctatatatgtacactgaggacttttttatgtgaaaggcattctgctaggaacttggagatgctcatgactcttagaagttgataatccagttgttggtatataaacagcacgttaaaagattttaaaaatcagtgatgttgatgtgaaaatttcaaattaaagctctagctattaactgagactagaaggggaggggagcaaaagtcatctatagatggtatggagaatagctgcagtgcaaatggaatcccactgaaaggatttaaaggttcagtgctcttacttgtcatattattgctctgcatatgaactctaataaaagcattatagtggggctcacatatatatccactatatatgagtttaaaatgtatttatatccaacaagactgcagtcaagcctcaaataatctgattcttaattttgtgtgttgagcatatcaataccaaaaaattcttggtgaaaataaactggatactaaaaagctaattagtctactgactatctaactgtggtaatcagatatttatttggggacattatactaaaatactgatggaattatcccccatttcccctagacattacgtgctgctgggaaaacatacatgatattttttgtcctggtcattttcttgggctcattttatttggtgaatttgatcctggctgtggtggccatggcctatgaggagcagaatcaggccaccttggaagaagcagaacaaaaagaggccgaatttcagcagatgctcgaacagcttaaaaagcaacaggaagaagctcaggtactgagtgataaaagcaaagatttatcattattattattagtttctaagtagaaatagtgttatactatagagggtagattggaactgctttttcattttatatataggcattgtcattagaaaaaaaagtattcaaatatgaacttgtttctgaagttagagtctaacaaactttttagccactgtatataaagaaatcagctagcggatagaaaatacattagagataaggtttactatggaattgtctcatagaacctaagagaggaatttaattttttatttaatttagaaaagaaataaaactgatatttccaattattagtgattcacccctaattatgacatttgagattttgttctgaagttaattgattttaaaggttgacaagagactttatatatacctatgcttaacaattctttgggatttctgtagcaaaaaaaaaaaaaaaaaaaaatgtttgctatagcccacatcaggatatcaggaaggtatctaaagttagatgccaacttgagatttttattaatattaaaggctgtgtgagctaggggtatagtgaatgggacattaatgtgttgaggagaagagacggaaacacagtactgtattaaaagacagaaaaaaaaatccatatactgaaaggtgaagactcacgaatatatagtaaaaatctgattcatgccagttagaattataatttctcaatatttttgccaacatttggtatggccagtctttttaattttagccattctaataagtatctcatttctgttttgattttcattttcctaattactaatgttgagcacctttttctgttcttattttccatctgtatagcttcttttatgaagtggttgttcaaatctttaatcccctcctttttttttagttaggttgtttgatttcatattattgagttttgagcattctttgactctttgggatgtaagtcctatatcacatatatgcttctcaaatatttaaagtgcagtttatccagagtattatttcttagcttttttgtttaaatcattcttttggatctaagaaatttttgccaagtcaacaccatgagtattttcttctaaattttcttcttaagttagttttatgctttatatttaggtaaataacccattttagttaatttttgtataacatatgagtgatatgttgagattcacttttttaaaatgagtatctaattattccaactgcataaaaacaaaatattcattctccactgcattgcctttgaacttttgtcaattattagttgtccataggtgagtttgtctatttctgaactctattctgtttagtttatttgtcatttttataccagtaccacactctcttaattcctgtaccttttatgacgagtcttgaaataacatagtgcaggtccccaactttttgttcttttttttttttttcaaagctgttttggctgttttatgtcccttgtagttctgtatgagttttttttctaagtttcatatatatatattttttattatactttaagttctagggtacatgtgcacaacatgcaggtttgttacatatgcatacatgtgccatgttggtgtgctgcacccattaactcgtcatttacattaggtatacctcctaatgctatccttcccacctcccccacccaccagttagaatggcgatcattaaaaagtcaggaaacaacaggtgctggagaggatgtggagaaataagaacacttttacactgttggtgggactgtaaactagttcaaccattgtggaagacagtgtggcgattcctcaggtatctagaactagaaataccatttaacccagccatcccattactggatatatactcaaaggaatataaatcatgctgctataaagacacatgcacacgtatgtttattgcggcactattcacaatagcaaagactctatatgagttttaaactccatttgtcaattgcaatttgaatgatttctattgctgtcttcaagtcaattatcttttcttttgaacatttaatctgccgctaatttcatccagtgtatttgtcatctgaaacattgtagttttcacctctgcaagcttgatctgtgtcttttttatatttcatatatctctaattaacattgtgaacatacacaatacagttataacaactgtttaagttccctgtctgctaatttgaacatctgtgtcacttcttggtcagttttgattaatttttctctttattatgggtcacatattcctgcagttttatgttcctgacaatcttcaattgaattccagacactgtcaattttactttttttaagtgctggatatttttgtattcccataaaaattattgatctttgtttcgggacatagttatgttgtttacacagtttgatccttttgtatctttaaacatttgaaaatttgttaggcaggaccagcataccatttattctaagactaattattcctcactagtgaatcaagacccttcctaatactctacccaatgcgcatttaaaacgaagtgtttgccagtgtaggaacagacactgttctggcacagtgtgattgccaggtggtgttctctcttatcctcagcctcaggtagttttctaagacacatgcttggtgaataatcttctcagtactcaaggggaacctgagaagatccctagagttctctctctgctcaactctctcctctgtggtaccctgttttgtgaactatacaaccaccctgattttcctaaactcagcttcatctcatccattcatggagtctgcagagatacttcctctctacatcatagtctggaagttccaggccataagctaacaaaagcatagaactgacttgcttgcttttccattttccaatatcttaaaacatcctgatctgatgtccagtgccttcaaaactactgtaacatgtattttgtctgttttattggttgcttcaggagagagcaaatctggtctctgttactcaattttggccagaagcagaaatccaaataatatttttatgcactgacttttttgaggatttttttcagatgaatggctccacatatttgaagtattctttggatgacagtatataacagaaattggtatattcaaaatttaagtttttaacaattctgagttactttgaagatgcacaacaaatagcattaggtcctttctcaaggcattttttggggtaatggagatacagcaatgagttgtttagtgaattattgagctcaactctaggcatagcttttgctgaacatgctagcttgaccactttcatcttaccattggatacagagtagtaatgtggatataccttattgattttatacagaaaactataaacaaatttggtgaaacttgaaaatattttaaaatatacctcatgcttgccagaaagttctacatttgaattatttaagagttttattctatgtcaccataaataaaacacatttataatataataaaataaaaatagctatttacagggcaaatactttatttcaaggttttaaataagtgttataggaaataatgttcataaattgcatatgattgtattttaaagcactgggtttttctattatcattaataaaagaagacaaattaatgtgcttgaaaatcctacacagataatgagtttattctaaaatgcagccattttagggtaaaatatgacatcaattaaaaagagtatagtctttttgaacttagaaataaacatgcactatttctagtagaagtttaaagaacctatgattatgatgagttcggctaaaaaacatcagttctattaccttagtagtcagttactgaatcttagtgaccaaatcatcacaatttgattcagctttagcttcatacatataaaatttaaatttatccaaggtaaagtataatactgattggagtagcacagtgccaaatccattttagttccttattgacaacacaagtaatgatgactagtaaattatcaatgttgaagccaggaggaagtggaggcaaagacagaattagtgcacctataagatcatttatgctgcagtgtagcttaagtctccctaaccacctacgactcttcaaaagttactatctagccaatgacttcatgaaggctagcatcacttccatctttgtttattattggttgaggggccacctagggctagtcacggtgtaggcatgagaaaataatgtggagaaacacaaaccctgcaaagaaatcaatgttttgtcctagatcattctaattgtgtttgacatttaaattgtgatatttaagtgcctaatgttgcccagcttagtatatcccatagcagtctatattgctctgataggaaaaaatttgggagtaagctctagaacaaaattcgaaatagtagctcttaagaaatctaatataattggggtagaacagaaataggtataatgtcttgtagctttgaatgggattttaactggattatatacataaaatgaacaaagtattagttatgtggttatatttttacggacacacagatacagtgagttacagagcctactttgaatcacacaaaaatgttataagaaaatgtaatttcctgagtaaatattaagtgaaatttcttatttgttaaaagaggaattcagcaagttggctgtgaaagtaacacagttattctcatacgcaggacattggtagtgtcacagagttgggtataaacaggtacacagacatgagagatgacaggaaacatctgcctttgagggaactggcaaatcactggaagtggaacaaatgacagatttgagttgatgagtgacacagaaaatgtgtctgaggttacctttgttgccttagaaatctgttttggttttgagttatttgaactgttacccagaataggtttggaaataatgtcttatgcaaaacaaagtttgtggccgggtgcggtggctcgcgcctgtaatcccagcactttgggaggctgaggtgggtgggtcacttgaggccaggagtttgagatcagcctggccaacatagtgaaaccctgtctctactaaaaatacaaaaattagccaggtgtggtggctcacgcctgtaatcctagctactcagggggctgaggcaggagaatcacttgaacccgggggtggaggttgcagtgagccgagatcatgccattgcactccagcctgggcgacagagtgagaccccatctaaaaaaaaaaaaaaagtttggaagtgatttaaatggacataagttgtaggattatggtaagggactattaccaccacttcctttgtttgcagggacaaacaagtcaataaatgattaacactgtgtgttgtgtgtttgtgtctatataaaatagaaaagagaattaaggactttatttggataagaaagggtatatatatattcactgtttcaacaaatggtgtatattatgtacctcatatgtatccagaactctgtaactatatttaacttgctatagataagtgattcatttattcactttattttgcatatatagtcagagttataaaatgtacttaatatttctcattttacatcatgaattatattaaaagtgatactgatgatcaataattccattaaaaacctggctatatgactctataaaattttataaatatctaaattctgaattactgttttatttaaatgctgggtattgtcttatatcaagtcttagatttgagcttccattatgaatatagtgcttaatataaataaatatgttacattttatgtgttgcttggtcaaacacataaatttaaaatcatatttagtactaagtttccctccctgagatcattgtaatcctagagaatttgcagcatagtaattttagatttaaaatcttttttaaatttttaaacatgaagtttaaaaatgaaaactacttaggagagtttgcttcttctcaagaaagatgaaacataaagcacaaagtgttgtcaaagcattataaataggttttatctccatttcttcctaaaatatgttgttatatagactgttatgacagtcttttatgatgtcttgaaaagtcaagtcttttatgatgtcttgaaaagtcaacttgctatctgtagcaagttaaatataagttctataaagttcttcagaagcatcaaagtcaaggttaagtatgtcttgttcttcccccacccccaccccagtgtctgagacaattgatagcaaagtacatttttaaatctttattcaccaattatttactgagccttatttatgtcaggtgacatactagtcactgagcatacaatgatacaatttctatctagcttacagttaatgggaaagataatatattagataagttagatttgtttgtatttagtgatgacatatgtaaaaagtttaactgatattgtcataatttaattattttcacttctgtggttacatttacaaatagtaatatacttaatgagaactcagctttgatgcacaccatattgtttcatatcctctgtatgtcattgttagatcatttccagtctaaaaatactatttgccatgtttcacctcagagctgactgtgtttcatttgtaggtacagaaattcaaagtgcttaagaatacttagtgctgcaatatagaaagaaaatatttgaagcagttctcataatcctttgaatgaatttatgtaatgctatgttaatcatttgttatttataatattaaataatctatgaacgtttaacattttttaagtgatatgtaataaattctctgggagtaacatgatcacagagatgtgaactacagtcctaaatgtaattcaaaggaaggaagaggataagctatctaatacatttccctacttccatctggaggtaaaatagtagacacttgaaatgttttatgttcacaaaaaataaaagaaacagtcttttgtactggatttagaggggaaaaaatacgactcagctgctcagaagtgcacacaggaggaaacgttttacagatggaatcagaatggtagttagataagcaaccaccacgaagaaaacatttgctttttaaagtatagaagacactttgaagagaacagttgtcaccaaccccccccccccaaaaaaaagacaatccagaagataggcaaaaccagatttttcttgctttaatgcatacactagcatattgctttatatgatttaaaacataagggtcattgttaagtaaactcttgtggtgagacaaaataaaaggactagaggatagacttttcacttgtagttaatgagtcttaaatggcaatattttaaccatactcaactgttttcaaagctctgtgttctaaatagtgcctggctttgttttatgacaggcagttgcggcagcatcagctgcttcaagagatttcagtggaataggtgggttaggagagctgttggaaagttcttcagaagcatcaaagttgagttccaaaagtgctaaagaatggaggaaccgaaggaagaaaagaagacagagagagcaccttgaaggaaacaacaaaggagagagagacagctttcccaaatccgaatctgaagacagcgtcaaaagaagcagcttccttttctccatggatggaaacagactgaccagtgacaaaaaattctgctcccctcatcaggtatgattttctactaagtgctctggtttctttgtcattgctattgctttttagtttttgtattttgttttggtacacttttgtactatctgacttcagtgagggacagggaactaacatttaatatagttgtttaaattcttataatagattgtcttcaaagggatttttattaaaccattaataaaatgttcaccattttgagactgattatatatacagatagatatattgatataatatatagatatatataatatatattgatataacctatatatcaacctgtatatatatatgtgtgtatatatgtgtctatacacacacacacacacacacacacacacacacacacatatatatatatataacctacactagcagacttttcaatgagagttttggaatctcttgtttacattttccattttgagaccccagataaacttattttctttgagaatgggtttctgcctttgttatccaaagttgtgatcgtaacatacatataaattttgaaaagaagtgttctttgggttttgtctttatcctttgattaagagaactggactatggtgagtctccattttgcttgcatagggtcatgccgtgatacattagaatgaaattatgacctaaatgttcttgaagagaacagcatcaaaggtagtctatttttgctctgatttaatgccaactacctggttcttcagcatagttttaagtaaaagagtaaaaactagtttcaattatttgatgtttagtaagttttatggattagtaagttaatgtattgtttacatatgtctgatgtaaagaataattagttacaaaatctgtgataagtacaattttggctttgaacactatttggcaccattagaatttcatgtgctatgaattgcaaatgcttctaatcataacaatcttgagtcagaattataccctaaaaataatgctttgagagataatatataagattaatttaatcaaaaactgcaaatcaaccaaggggtatgatatatttttcataaagaaagaaacttctaaaaaaaaccagaagtaataaacacaaaattcaacatagtatttacttttggttgggagaaaaggtaatatgcaagttctcagtgaatgttttataatctatctttaatatgtaaacaaatatttttaaagaaaaaagtagactatattaataacttaaaacttgtattctcatattagaacaaaatggacatgaatacacaaagagttttaagataaagccatttttctgcagataacatcaatatcaagaaattcaactattactatcttgtgtaatacaaatataaaatatattatcaaatcagtataacatatttggaattaacttgaagctctgaagggcaacttggttcctcagatcagatttttttttcttaaacagtcacctttgatattttggaattcttaaaactattaggagttattagaattaagagtatatgaaactatagcataatgatgctacagtgaacacaaacttttgtgttcatatctcaactccaaactagttctgtgacgttggtcaagtcacttgtactttgtaaaatttctgtaaaataaagtaagaatacctacattaaagagatttaggggactaagcaatatatagaaaatctgtgtgacaaagagtaagtctcttattaagttaaaatcggtgaatgaatttcaagtgagggaaagcaaacttctgagtagtttcaattactaacaaatgtatatacataatttgatagcagtattagttcctttattgtttcatcattttgctcaaataaattttgtagatcagttcattcagtccaatcaacaaatatttattgatcgccaactatgtagcaagcatagttcaagatgctgaaaatacctcaaagaataaaagagactcaatccactgacctcatggaaattttttccaaaggagacggacaatgaataaaataaataagttatagactgtgttagaaggtaacaaatgttaagggaaaaaaaagtaagcaggaaaagaggaacaggagccataattggaggtaaaattttaaatagggtggtttacaatgacctcactattaagacattttgggaaagatttggaggaggcaaagaaagaggctctcttaaggaacagcattctaaactgatgaaagaggaagtgcaaaaccctgacatggtagcatgcctggagtgcttaagaagcaactggtagacttggtttgctggagctgagtgaaccacagacaggcaagagcagagagcttagctgatggccagtgttttaatactaaaagcagaatcagtacatacatgtggtagatgtcgctcattttatatttgtaaatagacagaagatagatggataatttcaaaagtgaaggaaataatctattagttttaaatttgcatatcccagtaaagacagactaagagcattaacaaaactaacaagcagaaatgtaccataaacggtttacaatttctgcttctgtaaacaaaaaaggaatctggtagaaagagaatcagtgaaggtggtggggacaggaagcgtaagatagacagtaaatactgctcaaatcaaatgtatcttctgaaaatgtcaaagcagagagggcataaattgtgggtgccctgccttctattcacataaattacaaatgttattttatgtttattacattattttatttttaaacagataatgttagttgtacaaaataaagaaatacttaaaagtataaaatgaaacctcaaaatgctaagtacttctgacaaatattcactttccttgttcccactagaacatcttaaaattcccagcatctttttccatcttgacttttcccaacccactttgaatccaaaccctacatgcatgactgtgtcttatagacctaatttcttctattttcccttttgttactgaaaattaagaaacagtctacatttatcttctgggaacaagatgaaaaagatacctgggaaatatgttttgacatgcctgaggtaaagaaagatggcctttcactccttaaaacattaaagctggttttccctagagaaagtgttgccacagctgtgggtattccctccactctgctgcatcttctagtgtgttatttttggtttattttctctgaatgctatttctgttatcttctttttccgtctctgttgccttgaaagctgcgctcacacccattattatacattccaaagagtgaatagaaatttcaaataaactcagagatctggaacgcctttgaaaatacctgacataaaaatatccaaattaaaggcatgtcccagatacatagtggatgtacacacgtaccacatactcccaaccaatactgtgtagaccgattttcagtttccagagacagtttcagaacataggtgtattgaggtgattatactcagccatcctagggattaatgtaagaccaagttagtatttctctgagtgtaggatgaggtccaccctgtgttagggtcacctggaatgtgtcaggaaaattcagattccagagtcctatctgctacttcctgaatccatattccaaaatctgggacctaaaaatatatatttttaactctcagagtgattcacatacactcaaatgtttcaaaacactagttctgggctgggcatggtggctcatgcctgtaatctcagggctttgggaggccagggcgggcagatcacctgaggttgggagttcgaggccagcttgaccatcatggtgaaaccctgtctctattaaaaatgcaaaacttagccaggtgtggtggcgggcacctctagtcccagccaactcaggagggtaaggcaggagaatagcttgaacttgggaggtggagattgcagtgagccgagattgtaccactgcactccagcctgggcgacagagcgaaactctgcctcaaaacaacaacaacaacaacaacaacaacaacaacaacaacaacacgagttctggatataactgttattatattgatcatttaaatggagtctgaggaaatgaaaaacattagcattctttattaatggggggatgaattgatgtcttcacatgatctaatctcttgatcactttgctgtaaaatcactctattgtctgcccttcggtagacaaacctgctacaggaattgagtgtcacatagacacagcctccgatggacaagctggacagccaatagttcctgtggagaatctaaccaaatccaaaggaacagagcacttcttagtgaataatatccttccagaatatcactgagacagaggacaacaaagattattctggtgctttgcagtctgggaaaagccatgaaaataaagctaaaaattggggcctaagaaaatcagcatgacctaattaggcagaggaaccaagaatacatttgacagagtctgccttttctgttttttccactaaaatcattttatttggttttacactaaagcttagaagaaagagaagatccaggaatgtttgctgctgacatatgtatatgtatatgtatgtatgtatattaccctgggtgtgaagagaagtaggaaagggaatgagagagcaaggaggaatgccattgttcatgatgaggggagaaaacaaatattctgcagactgaatagagatgtttttgaaaactatctgcaagacaagaatacacacagaattatttggggttgctagtttaaaatcctttcaaaatgtgaaagaaggaacttcaagctaaatcctcattttctggtactaggaaatagtttgcttaatttatctgggaatagctgtaatgaaaaaggttttgaattgtctctttctttttaatataattaaaataaaacagaagtatatgttgtttttcacaccacctgctggtgaagtcatgttatatgtcttgcttttacaagccagtgttatattttacacaagaagagtaatttgtgtagcagtttaggaatcctctgtgttgtgtttgctatgacatatagtctctcaaataaggtgaatcattggttgccatttgggaaactgttagcaaatttggaagacaacatcgtaggtaagttttgtgacttctgttcccatgtgggtagagacaaacagtttcagagaaagagtaaactacttttctttcagaattcaaaagaagagaatggaaaaatagtagttttttaaaaaagtaattatcctgaagtgaaatattggctacaatgcaacatttgaaacaaatattttaaatttgagctaacattctcacttgagccaaaacttattctccaggctacattcccttcagattatagcattaagaagtagaagctacttactatttgtttaaccaccattcccatcaaaagaaatcatttatccttttcagcatctggtccctaacctatagcattatgataacccaatccacctaaagtgaagactaaatgaagtggttgtatacttagtaaattgcaaatcagtattgttagtcagaaaaacactctttgtacttaaatttgctttaataaaaatatcaaaatatatgtgtcctctataaatttgattatccatgtttaagagcaagagtatactaactccaaagaaaacagatcctttaatattaatatttattaaataattgcgttcttcccctacccccatcccattcctttcctttttgctttctctgcagtctctcttgagtatccgtggctccctgttttccccaagacgcaatagcaaaacaagcattttcagtttcagaggtcgggcaaaggatgttggatctgaaaatgactttgctgatgatgaacacagcacatttgaagacagcgaaagcaggagagactcactgtttgtgccgcacagacatggagagcgacgcaacagtaacgttagtcaggccagtatgtcatccaggatggtgccagggcttccagcaaatgggaagatgcacagcactgtggattgcaatggtgtggtttccttggtgggtggaccttcagctctaacgtcacctactggacaacttcccccagaggtgataatagatgacctagctgctactgacattattcaccaatttgaaataatcaaagcctggacagtttaggctgtcataccgtcctgcttcctcaaaatgaaagttggtaaaaataatacatgattaatcaaagggaaaacaatagaatattgagaatcaattgaattgtatgggaccattagcttttgttgtatgggaattacttgtaagggaccatggctttaggttaaaagggccccgtttttagagtctgctatgaaatacatatctgcaaatttggtagacctaccgagacaaataatggacattttcaccatcaaatctataagatgtatattcaccaagaattgtataattatctattcatattctggaaaattcatattcttaaaattaaatattataaccaatttgttgataatgggcaatttcatacaactgtcaatatttacagtgctattttaaaatgactctaaaatgtgttgttttttaataggataagatatagaaataattaaagaaatttcaggaaagcacacacatttcatcgtacatctgtgtttgtgcatggaaaaaattggcccacatatgtcaatattgtcaatatagcctcaaagaaaataattcagccttgagactatataatcataatatttattggggggagattgatctgattattaatcattgatagaagataaaaataattttcacctgaatgaaataaaataataaatgactttagcatgtttacaacaaatttccttgaaaattgtgacaggttaattaaaatagttctgtaatataattgtgttataaaactgcatcccactggtgaattcctcttaaagagtactacctgtgataacttttttttaaaaaaaaaactgtttataacttagcaataattcaatattttattccttgaaaattcttacctggaaaaattgcatgtagcatgatttgccaaagaaatgctatgtggtgttgtattacttattgggaagagtggtttgagccatcagtatttggtttgcagggcaccaccacagaaacggaagtcagaaagagaaggttaagctcttaccagatttcaatggagatgctggaggattcctctggaaggcaaagagccgtgagcatagccagcattctgaccaacacaatggaaggtaagaagcaggtcatggaacagccaactttctgtgattatgtgctttgtgaactattccttcttttcatagaattactgaagtctgttacccagatcgaaactatatattagacctaagaatgtgatatatggagtacattatcacattgattacaaaaactaatattggccttatttctttttgacttgggtccttaccttacttgcagagtgatatttcaacacttgatattatatcaatgaggatttattcttatgttatgttactcatatgcaaatagagtaaactcttccccttttctaagtcttggtatatagaagcataaggaaacatttctttcaggctttagtctgttcttcaggcatggaagtgttgatggggttgcgggagcacttaaatgagttgggcaaatcaaaacctgtcctccactgcaagagagatcctacaaaagggtctctcttccatcttctacatacacagcaaccattacattcctccaaaggaccacggaaagaaatgtttgttgattttgacacagaggaataggcagcaactatttatacactaaacttgttcatacatcacacagccctcactccttgaagtctggagagagaatatattagtactgccctttttagatcaattatatgtcaattctaacatatgttctttagaaaacatcaattacattttatatcatgtcttcttggtgtattagatatacagtcacataataattattttgtaacaggcctcatccattaaaatttcaagcaatattttaaatacatgatgctaaaattctaaaagatatgtacaaaccacaaaagtagatttgagtctgaatttatactaaaaagaaaggcatactacgttctcactgtgtgcaagattaatgttgatatggaaactatgagaggagagaatagttcataaatgttatcacacacataagggatcacaactttagacaatgtttttaaaaaggtactttcagaagaaacaataattatttaaaattttaatagttgtgtaatgtttatttaaaattctgttttgacaaagagaatacagcactttaatcaatcataacctagtcattttaaaagcaaaatattaaattcaaagtgcttattttctgtattcaaaagagaaaaaagtcgatctatatgacattttaattaacattttctgaaaatatttaatgggattgtcttctcaagtttcttaagtaatatgaacttctattttcaaatataagcatcaattttgttaaataatgtaaaatctactagcaataataactcatttttgttgttatttactactcttccttgttattgtccctccagaacttgaagaatctagacagaaatgtccgccatgctggtatagatttgccaatgtgttcttgatctgggactgctgtgatgcatggttaaaagtaaaacatcttgtgaatttaattgttatggatccatttgttgatcttgccatcactatttgcattgtcttaaataccctctttatggccatggagcactaccccatgactgagcaattcagtagtgtgttgactgtaggaaacctggtaagtacatttgaagtttacttatttactttggtagatgtgggagagatagaccaaagggaaagatgtatttgtgctgtgttgaacccaaaaattatatcctctttcctcatagaaagaaatatctaaggaatattacagggaatctcagagatacagcctaaaactcaactggtatgaatgctgattgtttaggccaatgtctgtgctgattgatcatggtgtcttaccagttgtaaacgtctcaaaatctttacagttgttcttgctggaaatgtgggtccagataaaccaggagatctaatactggctccacaatcatgtggttttaacccacacagcctctaaaacaatcatgtccattgaagggatgacccaaagattgatgtatatgaaaaaaagaacatcattgtttcaagttaactacctaataaaaagcttcagtgataatcatacaagaaaaaaaatagttgctaaatttgcatttgtgatttagccatacctctggttcaaattactgagcattcatctgtgtctatgtgtgctaatcaaaatgggtgaacaagtaagaaaagggtttacatatattattaatcaagagctttctctgtactaaaacaaacttggggcaaggggtagtggggaaactggaatggagggaaaaggtagactaacaaactaagtaaagggcagtattgcagtctgactttaggaacagttttcatcaagggcttagatatggcccacaagttcactgcatcatttgtctttaggtcagcaaatgttcagcaagagctcactgattttccatcctacaacctctacactgaaaagcatgaatctccttttgagtctcattccaaagactctcctggtagaacttaggcataatttaggtcacatgctcacctctgatttaatcagccttggcagagggtgggatcatgttgaaaacatggcagtcctgaggaatcatgcgtgaaggagcaattgccaacagaagggggaaaggaaatgctggtggacaattggataattgtgtgccctaataagtgacctcaaattatctgcattatttgactcagtagaacacccaccatattcttgagattttcttcatctttggcaaaggccgtgtcccatttttctgttgcctctctcagtgtttacatgctagtcactcaataaataacccactggttgataactacccaaaaaggctgcttcaagtagcatgattttgcaaaagagcacagactttgcagtggagtggaattgagtttgaccttagttgcctagtgcttactagtgatatggcctctggacaattctgataaacaatctgaatctttgttttctattattgaaatgagtgtaataatacccttcgtgcagagttgttgtgaaggtcacatgaggtaatgtgaaagcacctagactgtgcctggcatctagcatgtgctcaataaacagtttccttcctcatatatatgctattaaccttttagacctttctttgaaataatgatggaaaatatttctggtgtagttcttgtatttttcccaggatattggacagttagggaagttgaacaggtgaaggaaatttgccagagtgaagcaggaaatatagaattccaatgctgaagcagttgagtatggaaacacaggataagagaggctggattataagatgattgaatgaaaaagcactagacaaaagcatcaaatctaggtcctagtcaaagtgttcatggtaaatatctgtgtggttttgaaaagtcacttagatccttgagtctattttctcaacacacatataaacaatgagtgtgttggactaaatgactttttatgtatgtcccagttctacaattctatgactttatgggtagtaactgaaataatgaggtgggaaagtggaatgggagactgatgcctggtagattgtttgtgatagaaccatctataagttcaggttagtgttggggaaacaaaacttgccaagatagagagcataaattatagggaacagacttgagttatttatttctatccataaaaataggagaatatgtaaactgactgtctctattggttgatacctccttactataatgattaacatatcaataatgcattgcataatttacaaagcatttgttcatagaatatctacccatagaatttcctacccataacaacctttatcataaatatccatatgaaagtaatacatatgtttaatatatatgcagagaaagagcatgtgagagagaaagaaagaatttctatcattggtgctaagctgacttaggactatattatagatcatagatgattacacagaatgttttgtggagagcttataatttgctcattaaaataaatttagaatatctacagactagtttattactgctcaaattattgcatactgctttatgttctacatgaggacactgaattgtggaattttccatcttaacttagatcaatatgccccattttgcattctgtttctgcagtacataaaaattacatcacttccttgttgatgagattaatcaaatttgagtatcaagagaccttgaatctcaattaagttttgctaaggtgctccgtatttttgtggagtattttgttttgttttgttttttaatcattataaaatgcttgctcccatcatagggattcaatcagcaaaaaatagcctatcaatcatagtaggttagacaacatcataacaaacatttccaacttacctgacaatgctgaaactagattaaaatgtaccaaaaacaatcccattgatttttagggccttaactgaaaacagttacagagatatagctgtcattttggattgctagttgtaataaaaatattatttttaatgaaaagttttatggcgggattacatttttagataagcgtaaatttagggtatatgtttttaaaggtatgagatctagtcattttagaagagctgaaaagatcaccttatgattttctatagaaagagatatttgtagattatttacctggatggttctagctcaccttaaataatatatttctatcatcagagtgcctatttcaaataatagctgcttctaaaagttttatacatgaaataaaatttgtatagttacaacttattttacatttaccaggcaaactcactatttgaaaaaaaaatctttgatgtgttattctataaaatgaaaaatatatttttcaatgggcatttcaccatatacttggattttcatgtactaggcttgcttaaaatacattttatttctatttgagtgaatggatgactaccattaggctgtttttttctgtgatgggtatttcccatctgtgattggaaaaaatgaagtgttagctgcatttatatattcgtaagggtggatcaagatttcttttaagtggaaccaaataattgttatactgttattttgacagaattccttcaagataaaggctgatttatcttcgtaaatgctaaacttgactttacagtcataaactgcaacttgtaactatagcaaattaagagaattgctttaaaagattttctgcaagagtaatttcataattcttcatgtcctgtatctctcagcctatcgttttgagttaaaaaataaatgttgtgtttgtttcattgtttttctttctattgtcaaatacacatttatctagccactcaagtgacttattaatctcaattacatgtatatgcatactgagtattttctcctgctggtttcaattaaatctgcagcttcttgctctattaatccattaaccttaattctgaggcatacatccagagatcattataataaacaatttgtggcaaacttacttttgtttcaggaatgtttataaaattatagaaataagatggtgtcccttaaaaaacacaaaatcaaaaacaaaatatggtttttacgaaatcaatttttaataactttcagtaatatgtggatttgttcctgatgcgatactacccagaaataaatttggttgtgattatgttagaaatgtagtgtaccaacaagggcaataattcagtagctattattcaataccagagttaaaatgtagaccatgaaatgttttaaaattagtgtttttcttggaaatccagaagattcattaaataataccactctacttaataaaatactctcctagaggaaaaaaaaaaaaaagctagacatggctgggtgtgttggctcatgcttgtaatcccagtactttgggaggctgaggcgggcagatcacttgaggtcaggagttcgaaactggcctggccaacgtgatgtgaaaccctgtctctacagaaattagaaaaattagctgggcatggtaggtagcccatgcctgtaatcccagctacctgggaggctgagactggagaatcacttgaagcagtgagccaagatcgcgccactctactccaatctgggcaacagagggagactctgtctcaaaaaaaaataataaaaataaaaaatgaaaataaacatacgtgtgcatgtgtctttatagcagcatgatttatagtcctttgggtatatacccagtaatgggatggctgggtcaaatggtatttctagttctagatccctgaggaatcgccacactgacttccacattggttgaactagtttacagtcccacaaacagtgtaaaagtgttcctatttctccacatcctctccagcacctgttgtttcctaactttttaatgattgccattctaactggtgtgagatggtatctcattgtggttttgatttgcatttctctgatggccagtgatggtgagcattttttcatgtgttttttggctgcataaatgtcttcttttgagaagtgtctgttcatgtctttcacccacttgttgatggggttgtttgtttttttcttgtaaatttgtttgagttcattgtagattctggatattagccctttgtcagatgagtaggttgcgaaaatttcctcccattttgtaggttgcctgttcactctgacggtagtatcttttgctgtgcagaagctctttagtttaattagatcccatttgtcaattttggcttttgtcgccattgcttttggtgttttagacgtgaagtccttgcccatgcctatgtcctgaatggtaatgcctaggttttcttctagggtttttatggctttaggtctaacttttaagtctttaatccatcttgaattaatttttgtataaggtgtaaggaagggatccagtttcagctttctacatatggctagccagttttcccagcaccatttattaaatagggaatccttttcccattgcttgtttttctcagatttgtcaaagattagacagttgtagatacgtggcattatttctgagggctctgttctgttccattgatctatatctctgttttggtacaagtaccatgctgttttggttactgtagccttgtagtatagtttgaagtcaggtagtgtgatgcctccagctttgttcttttggcttaggattgactgggcgatgcaggctcttttttggttccatatgaactttaaagtagttttttccaattctgtgaagaaagtcattggtagcttgatggggatgccattgaatctataaattaccttgggcagtatggccattttcacgatattgattcttcctacccatgaacatcgaatgttcttccatttgtttgtatcctcttttatttcattgagcagtggtttgtagttctccttgaagaggtccttcacgtcccttgtaagttggactcctaggtattttattctctttgaagcaattacttggaaccaacccaaatgtccaacaatgatagactggattaagaaaatgtggcacatatacaccatggaatactatgcagccataaaaaatgatgagttcatgtcctttggaggaacatggatgaaattggaaatcatcattctcagtaaactatcacaaagacaaaaaaccaaacaccacatgttctcactcataagtgggaattgaataatgagaacacatggacacaggaaggggaacatcacactctggggactgttgtggggtcgggggaggggggagggatagcattaggagatatacctaatgctaaatgacgagttaatgggtgcagcacaccagcatggcacaggtatacatatgtaactaacctgcacattgtacacatgtaccctcaaacttaaagtataataataataaaataaaataaataaaaataaataaaaataaaaaatgaaaataaaaaaactaagacttgaattgatttgtcacattctctcactttaaattttagatatttttattcctgttaatgttcttctttataaattcgtgtagcatcagtgtttttcagtgctcttgaagtagtgctgatctctattttttaggtctttactgggattttcacagcagaaatggttctcaagatcattgccatggatccttattactatttccaagaaggctggaatatctttgatggaattattgtcagcctcagtttaatggagcttggtctgtcaaatgtggagggattgtctgtactgcgatcattcagactggtatctatttatatatatccctgtcgctcattggcacaacatttattttgaaattgaatcaatgtatatttatataattattaattttaattttaaatttacatcaatatgtgacattctaagaaaacatgtaaacatcctctttaaagctaaaccattttctaagaatgatgaaagcattcaaaatactctataatgattaggtatgtagggcacattagaaaacctacaagtactttctaaaactgtgttttaagtttatgaagcttttttggccttacagtctgtaaagatacgcaaataaaaatttagaccccagttaattttagctttttattaaccctacttctaggaatggggactgttttaaagcaacatgtgggaaaatatttgatgttattagtatcttaaataattgtataaaaaactttttgaattatcacaaaattttattgagaaatatgtaaaatttattgaaaattaagcaaaatgtgtattttttcaatttttttcctgtacatttttatcacattatttaggttattttacttttatattggcctataaaaatctatgatttatacttttaatatttctttttactgtctaaaatagaatctgaagataacatttatttgctaatttaaaaagtctctaatcaaaataccatttgtttacatgggcatatctttggatgaatcagaaatgttttatttattatttctgaaatgttttatttttatttttgcacttaaatgatattatgaccagatttacaattctaatattgttaacactattttttctggatttgaaattgaatcagttcagtatattttgagtttttacatctaccacgtgtggttctatgataccacatactaataaaataatgtctaaaattatattatgattactactaacagcatcttttcacttgattacagcttagagttttcaagttggcaaaatcctggcccacactaaatatgctaattaagatcattggcaattctgtgggggctctaggaaacctcaccttggtgttggccatcatcgtcttcatttttgctgtggtcggcatgcagctctttggtaagagctacaaagaatgtgtctgcaagatcaatgatgactgtacgctcccacggtggcacatgaacgacttcttccactccttcctgattgtgttccgcgtgctgtgtggagagtggatagagaccatgtgggactgtatggaggtcgctggccaaaccatgtgccttattgttttcatgttggtcatggtcattggaaaccttgtggtatgtatgtagtacaaatgctcataaattagaacaagagcagacagtagctaggaacgtggccagatgtagtaaacatatctctggtttatagtaagtggcctagactgaaatccccctattagcactcagagaataagcaagttatttaacttctcctgggctctggtttcccattttttatgacattggaataataaaactgaaatcatatctttaatgcaaagattaaatcagatgtatttatgaatgcctgggggcataaatattagattttcctttcttcttcaaagaaagtaaatttttatcactaagaagaattgtatcctaatattgttttgataagaaaatgacctctactaaatctaaaaagacaactatctattctataatcaaattgctctttgcatgttcatagttcatgtagtttgcttacttagagacataggttgcatagtaccaaattttgaagacacatttcaatgaagtagaccattatattttagctatgcattgtaattatccaagtaacttggaagaggacaaaatgttttcttccctgaatttgcattactataggaaaaccaattattacagtttaaattattcatatgtatggacattgtccagactcaaaggagttacttttaactgtgacttaaaatcactaatgcaaaagcatagtttatatatttatatgtttaatgcttaaatttctcagtcatgcgtgggcaaagcatttctttatgccatcatattgggcctttcctttgagggatacatttcagataaacttgttcaaaagaatgctactgggatacctacgaacatgtaatttttttctccagaatagtaaattagggagctctagattctgaaaaaatctgatacagaagtaaggaagcaaactggggcttttgccttgcatgtcttcctatagtgtaacatattctgaaactcaataactaactacatttcaggctaaaaatattattataaattttcttttacatcagaaataatgaattattcctgcattaaccataacttatcagttggctgagtaactttttcacatatcccatgatattctgaaagttaaaatcgcctcatactttctacacacacacacacacatacacacaaagaaagaaagaaaaagaaaagtaacttatgtgggtctagcctaaaccctggtatacttttagatttctctccatctgttgagctatttgaacatataaatttcaaagtgtatttgatgggaaacgtgttaaatcgtatataatttgcacttagaaatttctgctgttataaaagtttgtggccattgggccaaaggaatttgtatttcaagtatatcatttggaacatatcatcaggctattaaataaataagttcattctttatatacacgaagctagaaattccctaggaaaaaaaatggtaagatgaagtaagataaaatgattaagaagaaagtatctttctctctctctctctctctctctcgttggcagaatccttgagggtaggattttgtctttgcactggcaaacctgagtagacaccatttaaatcttagaagctctgctttcctattgtccctcccaataggaaaaaaagaagaggtgcttgttttatcattttgcccttagagcaggatattaggtcctttaaagagtgtgtgacttagacatggcatctgaaatatagtaagcattcaataaacatttgttgaaataattttagcaaagatctatgagttccctttttaggctgttatttaaatgcatatttcaatattaaaatagacatttttctttttttcttttaggttctgaacctctttctggccttattgttgagttcatttagctcagacaaccttgctgctactgatgatgacaatgaaatgaataatctgcagattgcagtaggaagaatgcaaaagggaattgattatgtgaaaaataagatgcgggagtgtttccaaaaagccttttttagaaagccaaaagttatagaaatccatgaaggcaataagatagacagctgcatgtccaataatactggaattgaaataagcaaagagcttaattatcttagagatgggaatggaaccaccagtggtgtaggtactggaagcagtgttgaaaaatacgtaatcgatgaaaatgattatatgtcattcataaacaaccccagcctcaccgtcacagtgccaattgctgttggagagtctgactttgaaaacttaaatactgaagagttcagcagtgagtcagaactagaagaaagcaaagaggtaagaatgcttttaaattttttgttccatttcctatgataaccatgtactacagttatttactattttcattgtgcttatatgcattatcaaaaagcaatattgaaagtcatatgtctatagtgatgttggaaaatcacaagatactctttattgggaaatggatttctaaaaattccaatttttcacaggaaattaaaccattctgagtctttagtatattcattttcttgatcatttgaaaatgtggttaaaaaatgtggccttttaggctgggcatggtggctcatgcctgtaatcccagcactttgggaggccaaggaggcagatcacttgagcccaggagttcgaggccagcctgggcaagatggcaaaatctcctctctacaaaaaaaaatacgaaaattcactgggcatggtggcacatgcctgtagtcccagctacaaaggaggctgaggtgggaggattgcttaagcccagtaggtagaggctgcagtgagccacgatcacatcattctactcaaccctgagtgacaaagcaagaccctatctcaaaaaaaagtagccttccaaaaaagagatgttatttagtacattacactctcaactacattatgttctttaaaaaataacttattttcgtcatctccttactctctatattaggttttgctatgatttttatgtgaaaactttatgtacttttgttaacctctgaaagtcttattcactatgatagtgtttcatttatgaaagtgttatacacattaggaaagtacaagtagtacttattatattttgcccagtcaaggatgagcagatctatagtcttccagagtaacttgaaaatactaagaactacttttaaaagcttcacttgagggctatagttattttgtaggttaataaacctactcttactgttgtgttactaggaaagagaaaaaagaaggaaggaagggagggagggaggaagggagggaaaggagaagagggaggaaggacggaaggaatgaaggaaggaaggaacgaagggagggagggagggagggaggaaggaaggggaaagaaagggaaagagaaagaaagaaggaaataaagaaaaaagggaaagagaaaaaaagaaggaaagaaagaaagaaaagaaggaagaaataaagaaagagaaagaaaagaaaaagagaaagaaaggaaggaagggaagaaagaaagaagaaagggaaggagggaaggaaagaaggaaggaagcaaggaaggaaggaaattgttcctactgcatgattagtattcttaagtttctatcatagtagtaatgttattaattcttcaatcctgtgttgtggaaaagaggattaaaattctttactattatttatttatagacgtttaatacatatgagtacaaagtaagtctagcacagatggagttatcaaagacaggttttggcttgagggtataatgttgacacagtgggaaccaaaccaacaatgtctgatttcgtgagcatattttggaactcttttttttaaataagtgtatcaacaaaacttgatctgaaatccctataataggtagctgacaatcttacaactcatagcttcctgactattttcaggtattttagagttgctgaaagatagtataataataagttggaaaatattttgaaaaaggtaaaatacatacaaaattaagtagtgatattttttctctgaattccatttaaagtctgctaagtgagttcaactctaatttatgttgctcattctgacaaactaagaattcaactctaattttatttcccatcacctggcatgaatttatgtaagaagaaataccagtcaattaacaagaacttactgagcactttttgtgaattcagcaatctgctggatactaggggtgaaggagagctctataacaaaactctccttcaaggaaatcttgacatatttgagtaagctaacatgaactcatgaaattattaaagacctattaaaaactttaatcctggctgggtgcggtagctcacgtctgtaatcccagcactttgggaggccgaggcgagtggatcacgaggtcaggagatcgagaccatcctagctagtacggtgaaaccctgtctctactaaaaaataaataaataaatacaaaaaaattcgctgggtgcggtggcgggcacctgtagtcccagctactcgggaggctgaggcgggagaatggtgtgaacccggtaggcggagcttgcagtgagcggagattgcgccactgcactccagcctgagcaacagagcaagactccatctcaaaaaaaaaaaaagtttaatcctgtcaggttgcatgtgaggctataggtattgaggagagcaagaataattgctaaatggaagagataaaattgaaatagacctcaaagtttgggtcaaatatacattatcagaaagcaaaatgctgaagcttactaaaggaaaggtggagctgacagtgagcttggtattaaagacagtttagggttatcattgcagattatcatgcagtgataatctacatgaggtaagtgttggttgaatatatagtggaaaatatgtttgaatgtgtgaggtagtttcagattataaagttttaaagtaagccaaagagtttggagttaatagggagctattttctgttctgaagcaggggaaggcaattggaaagtggtattttaagaacatttatttgatatcaaagagtaaaacagtttagagtgaaagataagaaaggttatcttggggaatatggtgataatcattcggtagcaatgaggtgataaaattctcagctagggcaataagtaatgagaattgagactcattggcaacttgacaaacctactaaagaacctgggaaaatggaaaaacagcaatgccactttctgaaatggtctttaaaaagggctacccagtttatgttggaaaaggagttcaattgggatatactgaattagaagtgtcagtgttgggaaacagagtctgagttagaggtcagggtttaaaaataaggtataatgtttgataatgcagattttataattacctgattccctgaaaatggaggagctcatcaaataagtaattataaagtgaaagaaaaaagagaaaactagagacaaagtagcataaaaacttagggtcaaaagaggtagaaaagctaaaagatagaaaaactttttctagattaatacgatagaattttttgacatcagatttatggaaagtaaatatcttaatttcctcctaccgaacagttggtttccaaagtatttttaaaatttcataatgaccaccgatatttcaaatgactgctaattatcatgcctttttaatggcttaaacataataaatttagagtaacaagatataaatctctcctttgttatgtacctggaaaacatttcttacctgaacaaaaatgtcttatggggtgatttaaataactactttatcctcctctttcaagctaaattttgaatacatagatttcaattacaaaatgtaaagaaattatttaaaatatataaatatgttagtgggaaaatcactaaacaaatataaaggtatatatttttataaagctagaataaaatttcaaattatcttgcacagtaatattaaattcaacaataaattttatatgaatgatttggtaaaatgaatactttaaaaacccaccaaaaaagtaatagggaactctcatatatgctcacacacaagataaaatgcagacagtttttaaaataaaaagccaataccagcatgttctaatatcatagagcagattaaatgagttctagcaaagtgcatttttgatttgaaatttccaaaagctgctagcatacttcaggtgcacacttatattggctgggttattcccttttaatagctatcacacacacgaacacatttaaaataacatatccataaagtgacattttggttcatgtttcttaggtttttgacacaagtagcaagagaacattgaactctactttgcagagcacagaatatccttcctctttgctaataaagtgagcactcacataagttaaacccaccagagttatacatttttcactaaaaaacttgcatgaaatgtctgcttgaagaggagacagtaaattaatcattaatttagatggtatttggaaactctagttactgtatttcctctgttcattttcataataaaggatacctgactatcgcagctaaagagaaatgatccctagaagtttttagagataaacatgggaattgctgttatatatgttatatatgtgtgtatatatattacatctgtatatatgaataccactaacataaataggctggtatggaagcaaatataaacttttgcatgaaaaaagttcaggaaattgaaggcatggatttcaaaatagtgatttttttaatcttgcaaaaacttggaattatgcgaatctttttgaggagctctaatgtagaatttgtttgtttttatattttttaagttctcataatcataatttcttgaaatacttatataactatgaatttttgcaatttaattcttaaaagattattggtttgtcttcctaagtgaaggatatagaataaatgcttttaacaatcatatttgaagttgaattccaaacacaatctagcaatatcatactgtgaccttcactgcttaccattcttacttctcacaggagtaaaatcaagctggagccatcaagaatgcagctctggtgttttttaaccagccagaggctcgtgccaccacttttacccaggttatccaagcaagttgtacatgtacaatcacgttctaaatgaattttgactggcctgcatgctactcagctatgttccttcccctgccatggcaaggaagtgctagacttgcccagctgctctctgctgaatcgtgtgacacatcacagcatggtcaggcgagatgggcaatcccaacatcatatttaattctgctaatgagttttctaatttagtctttagccttttaaaaccaattgcatgctctataggatttgtaatatctattttaaaacatgataggaatgtttatggttcaatatagtcagggatgtaggagggcatgcatttttttgtttctctgcttttatttcattaaaataagaccacaactttttattgttgattcagcctttataagtaaattgtattaccaaaataagcctcacagggtttttttctgatagtactgccactttcagatcattatattcagatctatgaatataattttcagcctatccaattcatgtgctccagatgaaaatgtttgctttcatgttttgggggaaaggttctgtaaaaaaaaaaaaaaagaaaaaaaagaaagaaagaaaaaagaaaaaaaaaagaatagggtgatcctgaggtttggagatgaagggccatagtctgtatgcatttgggcaacacatatcttggattttcatgtaggttgggaaaagttatgtctgcaaaaccatagtgatcattgtaacttaaaaaaggaaacatcatgatatatgggatgaaaattcattatatcttgatcattaagtaattggcctagtgtacccatttgttatttgaaatgtcaatgatttatgttaatttctccctaaatgttctatccaaaactgaccaggcaaaaaagagacttggaaaatttactattttcagttattaattattaattttagttttgtgaggagtaaagggaatctcccaagattattgtagatttgtggcgtaatgagcttttattttattctgttcactcaactttctccattgcttactggaatctcagccagagtgcgggttctgggagggaaattttgaaggaaatgtaaagagttcataaatattgggcagttttcaaggcttctggtgacaaggaatatctaattagtttggggttgtctctaggtttaatttatgcatagtcttattttccttagggataactgagaattagttgcagaatgcaaaaaaaatgagaaataaaattatcaatggaaaatagtaacaaagatacagtccatggtgatttatgcaatttttattcagcaccaaatttttagatttagaataaaacaacattattagtcattgaagaaaatctgatttctttttcttttttcttcaccagcagaatagaattaaatggtactgccatattattatttacactgtgtttataacaggattccctccttttcagagtctttatggaaactttgaaagtagatgtttgactaaggtccggagcacatgcccttctggacatgactttgtgctatttttggaatttggaaagcaatggaataatgactctagctttcagtttctctgttacatggccagtgtcttccaaatgctctttgtgaaattgaatgtgagataatttttgagaggagcagatgggtgtgtgaatagccattttaaacccatctcaacctttaaagatggtcttggtgctttagtgtacttctgctgaaaaaaaaaaaaattaaagctggttcagacgaatacttttgtatcctttctgaaaacaaatggcctttttctttttcctttttgatgctcttttaccctactcttcaactacaacgtaattattttcagtttcacataccatgttcttattcaggctattttaaaaataaaagaagctccggggatgttgtacatttaatatatgtccaggcaaaccagatggtggtggttcatatttttaatctttcgataagtgatcgtgaaaaaaaaaaaaaaaagagctactggccttttccttcccgcctaggacaagcaacccaatggcttcactgtgtggctgtcttgtttttcaggtgaaatatcataagtcaagatatggttatgcatatccaaaagatcagactaaggccctgatagtgtgtatgaccaaaactttcctcttctactagcaagacaaaaatccacaactttttagagaaatggctagattttaaaggcaatctgtaatggctgaatcttttattttgcctcttgaatcatacagcagtttgtgagagtcaaatatttgatagctgattgaaaataaatgaaatgtgagcgcatttcagtggaagtaggccagttgctaacattctcttctatctctgaaagttaaatttcattatttaattggataaaaatcaagagcaatatttgtcatatgggggaatttctatataaggtcactctattgggcggcggggaatggtctcgtggccttttttgggtgttaactctattgtttcttatgttgaaataacccattcctgtgagtggtatttgtagttaaccttcttgaaaacttcatattcaggtaccatgtctttgaggacatggttcttggatcagcgtgcggcttccacagcattgcgccgggcttctgctacagccaggcatgttttctgcggctgaattaggcctggagaatgttgcatcttaaaacctgcttttcagcgtgcatttgtagagcataagccatcatccctctgtagacccactcgtttctacaagggatggaaaaatttaacctttaagtgccataaaatattggaggagtagggagaaaatagtacaagaaaacaagtttgaacttgtactatgtggttttatatggaagctttctattattatgcctatattcccaattatatttttctaactacttcaggacaagtatgaatttagttatttagtatagtcatctagtttcttaatatggtaaatttaatttcaggtttctttgcttttttatatcattgtagtatcacagctatggcaatataaagaaagtaagttattctttatatttattggtcacttgcttttaaatcagttatatgcttttaaataaatttgaaggtcattttggttatggctataataagatgtatcacaaaccacccttgactagaatgtgaatgccaaagtgttgaacttatttagaaaatgtttagattatttagattatatcagtgtatagaattatgcatatagtatagatatgtatcatataaatgtatacaatttaaaatgcttatatagtttttcagggtgtacattagtgatttaaaaaatacagcagtaaagttctttatgtatccagtgactaaagcatatcaggtagtagatcataattcgtaagctgatgtaatttaataagaaggtgattcacaatttaatttataaatgtaggtaaatgcataactttagaaatttgatacaatattttcataacttcatacaattaaaacataggtactttcctatgataaatatgtgacctagggcattaaaaaataatgtagtagcatttctgactaagaagattaaattggccagatgcagtggctcatgcctataatcccaacactttgggaggccaaggtggatgaatcacttgagcccaggagtttgagaccagcctgggcaatatggcaaaaccctatctctacaaaaaatttaaaaatcatccaggtgggccaggcacggtggctcacgcctgtaatcccagcactttgggaggccgaggcaggctgatcacgaagtcaggagatcaagaccatcctggctaacatggtgaaaccccgtctctactaaaaatacaaaaaattagccaatcatggtggcgggcgcctgtagtcccagctactagagaggctgaggcaggagaattgtgtgaacccaggaagcggagcttgcagtgagccgagactgcgccactgcactccagcctgggtgacagagcgagactccgtctcaaaaaaataaataaataaatataaaagttagccaggcacggtggcatgcacctacagccccagctacttgggaggctgagatgggagaatcagttgcgtctgggatgttgaggatacagtgagccatgatcatgccacagcactccagtctgggccacagaatgagaccctgtcccaagggggaaaaaaaaaagattaaatcatgactgaggcagattcttcaacttgggaaaactgactttatgtcaaccttcatagataaggaagcctcccataaaacactttttagtgaaatgcaaactaatctaccgtcttctaagctttggttcataagagtcctgggagcttgcaaaagctttgccaagattccctctgagcattccttgaggggctttctagagcctggaagattatctttataatcagaaaatctctgtaataactgtaaagcaattctccatgaaatgggttctactccttggacaatagcagaatggtggcagggttttttccttgtccattgtcaaaagatatgttgtgcctcataatgccaggaggagagaggtgaactgtgatcactgtccctctctatcttaagatgtataaatacataacctccagagctattagagattatttatgtccaaacaagttaatcacattcacaaatatatgtaatctaatgaccttcccaataacaaaaaaatacaaccagaggtccatatgtgtaaacgattgattccgttgtcattcaggttagtggttattaggacttgtgctgtaaaggatttgctttaaatatgtatgtatttgtattaaacataagacacctgcagaatacatggaagaattataatgtgaaaaattaaacatctcacaattatattagcagtggtaacatgggaagtgaagggtgagtatattttctaaagttttcaaatggaaaagtacctgtgtgtgtatacatgtataattacttttttattattaacatattattttttattaaatcattcctatttaataagacaatgcattttctaatataattacatagactctttcaggaccagacttgacttatatatcaaaatggagagatagaattatctaaagactataattctctctataaagtgacattaaaaggtattcaaacattcatcgattcactcttcatgaactcaacttaactattcagtgtctattctatacttggtgatacactggatcttttggtatatatatgtgtctatatgtatgtagttggtatacgtgtgtgtatatatagatgtatgtaaatatgtacatatatttatgagaatatttagtcaaaggaaacaagtataatagattaaatgctctataaaatttagcatgaagaaaatcatgcaagaaagaatggcttcatacaggaagttgaggtttactatgataaggctcagaagttattaagtttggattagccaagaggacaaaaaagcatgaaactttctataactaacctcaaatactttggtttcttattgttattacttataaagtggatattaatagctgtcactcatcaaaagccatagtaattaacccataaactaccagtgaaattggaagaaaaagtggctgagaccaaacaattatccagtattttcttagttacaccagaagctgctacaattctacccagcagtaattttcctaggtctttcttaaatgaataaaaatatcctggctataagaagcagaaaaatcctaggagaggagaagatgtcttggctttcccacctctccataatgtagaggaaattaatggtaaaaaaaaaaaaaaaaaaaaaaattgtgctatcatgaccctaagaactatcagccaaaagtgatggcctagcttctctatttaccatactccaacctaggaggtactctactaaaaaactgtattttgacttaaagtaattttcataatatatatatttggacatggctaatgtcaggttaatatcaactttaaagtaacaccacagaaagtatcatctggatactaccctttaattagttcacattgtaaaatattaaactacatttgcattacgtcttcattaaatcaggaattttgagccaaatttccccaacatgaactgtgtttatggcctttttaaaaataacacagtaactctttcagaaggctttggcagagtgaccctaacactcagctaccaaagttaatgggggctttgaaatcattaacatgtccatgcactattgtttcatcttaaaagctttacattatctaggttgtgctgtgcgtcatgtctttgcaactgttttcataaaactttgcacaatcctgtcttcccaagtgatctcagagtacttattatttattcttgtaatattacagtggctcttctagccatgtggcatgtcacaatgatttagttaaaggaagtattcacagccggatcacacattgaattcagaatgtgctcctaatgaaagtctatagagattctggacaatgccatttatgaggaaatttccatttcatttagaattctttgacaagtattgaattcagttatgcagttcaaaaaaagagagagatccatcatttttcttctagtaaaataagaagaaaattatgtaagccagagaaaaatagagctcaaagttgaaatatgactgtgactaatgttaatgtgctgctctttctttctaaaattatagaaacatggacaatacttagaaacaactggtaatattctttgccctttgaaaatttccatctgaagaggtggaaattaaaaatttgatttgatgtattttaattaacataatcatggctagatgtcagcataccactttatccaactattcttggtttggcctcaatgtattaagttatattcatatggcattcatatacaaatgcagatcattaaacaagttaatcagtataatccatccattccagaccacccacattgaatgttgtctaaactttttttgtctgattcaggtcagtagtcacgttattttgaatagtacaacttgatttatgttaaattattagtacataatgatcagtaatgctaatagagttaaatgctatcactactatttttttttcacacaatgacacagtatttcccagttagttaaataaaagggggaaaatcacatctttgaaatgggattttgtttccagaaattaaatgcaaccagctcatctgaaggaagcacagttgatgttgttctaccccgagaaggtgaacaagctgaaactgaacccgaagaagaccttaaaccggaagcttgttttactgaaggtaaacaagctctgatgtgattaaatacaatctccccttgttctttacggagactgaatatgcctcatttaaaaaaaaaaatttatgaaacgaggtgtggtggcttatgcctgtaaccccaaaattttgggaggctacggtaggaggattgcttgaccccaggagtttgagaccaccctgggaaatgtagtaaggctttgcctctacaaaaaaaaaaataaagaaagaaaaaataaattagctcaacatggtggtacatgcctgtagtcgctgctacctcagccacagctgtatcttagagcttttgcagggagtcgaggctacagtgagccatgattatgccactgcacttcagcctgggcaatagagcaagaccctgtctcaaaataaatacataaattaaattaaataagaaaaatatttaaaataaatagtgaaggcatgtttatctttattttccttttttgtcttttaaaaagttaatctctctagatttctggattatacttatggcagtgactattcctggacagttaaaatgatctgataggtctttttgttttctcattctccataatgtgaggaagctgaccctatgagataaatggcattctagaatgtcatgtcattgatattgtaatcccttcagaactccttggcaatggtgtgatttgatttatagatgctacagtaattacattccctcccttacagttccaatgtggttaatgtgctttggctagagctgttttgagatgtaactgtattgtgaagctttggcagggaaagcaatagctgttctcacagaaagcagcacaatgtcttgaacacaaatcaatgaatatctattattcaatgtgactggacttaatcagatgagtagtagctcagagacttacagcagaagagtggatgggagttagaaataatgcgaaagctaggagggggaggacaaagggaaagagatactgactgacgagctgagtcataggtgtgactaagagaagcactgaggctgaaaaataaattagcttcggaaaattgacagtggctgatgcctgggaagacagcgagattttctgtgcatgtgtgcatgaaaagaattaaaaacccaggatcacatcaaaatatgaataaacaaatcgaacatgtagtttttgcctcaaacctgagagatgcacctggactattttcatcaatggccttgaggcaaaataatcctgactggtggtgaagaatgaaaccattgttacttaagcaaatctagataaaatatttccttgaattctaagtagctggctgagtatataagtctgagaataattcattatacaggagggatgctgacgataactaggaaatgaaggagatggttaccctatgaaatgattacctggaagtggagtggggaaggggcaagaaagtttattttttcctatttaagattaaaatatattttttaattaactatatttgatttttaggatgtattaaaaagtttccattctgtcaagtaagtacagaagaaggcaaagggaagatctggtggaatcttcgaaaaacctgctacagtattgttgagcacaactggtttgagactttcattgtgttcatgatccttctcagtagtggtgcattggtaagtgaaatgcatattggcaagaatcagattctggtgaaatagtttattctccaaaattaccagatgcaaacactgagcttcagaatcaaaagaaaaggcatatctgtgtcttgcagagcttggcacccaaggtttaacgatgcaaaattcagttctgaacaaatcagcaccatgaaacagccagatggaatttctcatctggtgtttatctaacagatgttttcctcactgagacaaccatttgcagagacattctgtaaccacgttactttccctgtcaaatactatccagttctccctaataattgtattaacatttatggactaaaagtgtattttaggtttttttttcatgtataatcaacttattctctcaaaataagccagatcattcaggaaattgtagaaagtaatgtttgaataggccaattctgtccctcattaacagaacttctagttatttctgagttcatattacttcattaaaagcatgtctttgtaacagtaattgagatagagacttaggggtgagaagtaggaaagaaagcacattctaaatcactaaaggcatgacgtttccctgccagcattttcacacttagtttagtctttagattttgtctgatgttcaatgtttatgtaaaatatcaataatcaaattattgttttgtactcactattatactaagcaattttttcaaatatttagaagaagcaagccatttaagtaaaataaaatatttttgattcataggcctttgaagatatatacattgaacagcgaaagactatcaaaaccatgctagaatatgctgacaaagtctttacctatatattcattctggaaatgcttctcaaatgggttgcttatggatttcaaacatatttcactaatgcctggtgctggctagatttcttgatcgttgatgtaagtattttaagtgatttttataaaattgtttttaaaagaggcaagtttgacatttcatatgtttctgttattaaaactttcactaataatgacataattatgcagttatttaaacaaaactgtaacatatgcaacaatgaggaatatctcatgggaaagagtagaggaggtcctaaaaacatgggcagtggtaagagcaaacacagggagaattgttctttaccatagatagacagcttttatttttctgaaagttaagtgcctcaaggtaagtaatagataagtaatatgttaattgacagatgtaagcacttagcttattaacagttcagtttaaaaaaacaaacaaacatctccaagaagcaaaataaaaaatgactgaaggtcagaaagtgtgtaaactgcactttaatcccttcctagagtacgtgtgactaaatactgtgaaattaacccatgtactgacttcattcagccacagccacatacccacagacacaacaaaatgcatttccatttttaaatcagtagttagatcccaatagctaatcaggtatttaccatgcaaagagttaggtgtaggtctgttctgaatctgattaccctggggtgagtagtcataggaacattgccaattatggaatctatctgacgtgcagcctgtttttttattgcaagtgacggagaggcactgggacaacatgacagtcctctgattccttgtagtctgtgatattccgttgcacaaggcttcacagcctcctaacaaaacaaggtgcttcaaatactatctctagccatttcctagcaatcacaaagctccttatttttagctctaacacttgtcaatatgaatcaatgattgccatatgtgtgcctcgttctttttctcatttttgacgagtctgggtctatccagattctactcttcttcctcccacaaacacatattcacaattatataaccaaaatgtgtttaaccctttaagttgataagaaatctgctgtcaagtcacttttaatagaccagaaatgactttcaatttccttggctggcctttcattaataatagagatgaatttcaacataactctgaaaagctatgcacaaatggaaacttagtattttcacattccgcagctagagtggaccttaaggaatatctagggtttattcaagacatgagaaaactaaagcctcagtttaaatattttttggagataacacagcttcttaataataaagttgatacgtgtccaaatttactaattctcaattcagtgctcctttccctcatagattttctgcctaactgatccattataaatatattagttgtaataggtaaatgtgtgtgtgtgtgtgtgtgtgtgtgtgtgtgtgtgtgtgtgtgtgtatcagactggcatcagactggctttgagatttagcatttaaaatctccaccttctctgtcaaagatggaacactaaatacattcaatgatcctttctggttcaaaaagatttttatcatgtatgaagattatgatctttttttatttttgagacggagtttcgctcttcttgcctaggctggagtgcaatggtgcgatcttggctcactgcaacctccgtctctggggttcaagtgattctcctgcctcagcctctcgagtagctgggattacaggtgcccgcaccatgcctggctaattttttgtatttttagtagagacagggttttgccatgttggccaggctggtctcaaactcctgacctcaggtgatccacccaccttggcctcccaaagtgctgggattacaggcatgagccaccgtgcccagcaaggttattttaaaatgtgatagaagttttctagaaaattctgacttacagttactgaactactgcattgtacttcgagtatttctatgtactccccttatatagaaaacatgattatcatgtaaaaatctcttgaggttggaggttttccatcatgtttttatccttgtacacctaacacagacatttagacatctattgagtaatgtttcaatgaatgacaaacgaatggtgccccaaaattactttgcttttagtgagtcaaaattagcagattggaactgggtactgaaagcctcctcctttgggcaagttactgtatcttaaatgggtctattttcttaattttcccaaagcaggggttaaatacatgaattaatgcaacctcagataacagcttgtcctcagagtactggggattcactaagctaaagtaaatataaggttaaaacagtgtttgaaagtacaaataaaatggacttaaagagtttaaagttcatagggtatatcactgtaacaaaattaaagtcacagaaaggtaaagaaaggaagcaatcaatgaagcaagaaaataaacagaacaccaaataaacttcctttcaaatgtatctttcgaaaactacattcacatacttgagaaataggtctgtgtaaaaaatgtaacctcttcaattctctgtctaaaagtaaaattagatttatagtgacatatctttgtaatttcctaaaattcattcatttattcaataaatatttttgagtaccttataaaggatcatatgccattcaagacaaaggagaaatgaacaaaacagacctagccttgttaagcttacactctattggaggagaggaacagacaggaaacgtgtaaacaagtaaaatctaaagataagataaaggcagatcactgctatgaaataaaacagagtactaggctggtaaattactgcgtgtttggggaagcggagggagggcaggagcagtgtgtcagctagtgtccaggagggtgtctaagggagtgcatgggggagggtgccagtcatttgaagacctgggagaagagaggagaagaagcagaagcgcttgaagtgggaatgagccaaggagataaaagagatagaaagaaactggcgtacttgtatgtgatgaaacatgagtgagagtggtagaaaccgaactcaaaaagtacacagtggccatggcaagaagttcgtattttattgtaatttactatacatcatatatgttaacattatgtaatctatcatatattagttataatgaccatgagaagccccagcagcaggataagcagggatctgacctactgttacaaaatgatcatatctggctatggagagggggaggcaaagagtaaaagcagaaagatcaattaggaggttgttttaataatgcaagaaagtggagattttagaccaaggtgatgagacttactgataggcttgatatgtggagtgaagaaaagagaggattcaacaaatggattttctttcaccgtgaacaaatgggtagaggatagaaccattaactgggatggggaatatcagaaaaagatttggcagggtaggtagatgatgggtgggagagagatgtattcatttgatatatattcatttgagatgtttattagacattcaaaacaaggtactgaactttatatagatctagagctcaggagagaatccagaatcttatgtatataaatttaaggttcatcgagatgtatatggcatttgaagctacaaacctgttttagctcacctaggcagagactgcaaataaacaaggcaacccagaaccaaactctggggacactataacatttagaagttgggcaaaggagaaccagccagtaaattagactgagaagtagtaattaaaaggaaaacaaaatatgcatggtgtcatagaaacccagagaagatagttgggtttttccaaaggagaggtgatcaattttatcaaaggctacagtgaaaaaaagtcaaaaatcaagcaatattggtatataaaattgacatttggatttggcaaaatgaaggtcattggtgttgtggatgacagaaaataatgaagatgaagaaatggagacagcaagtatgatacttcaggatggaatcaagggcaacttaactcatgcctctgccttccagaatactgcactagaaggagcactttttcagattctgtacaattcttttcttctcaggtgaaggtcaaaaagatactatgttcattttaaaaaacaaaatataccttactataccatcctataactacacaaactatactatagatgctgctattgaccacacaatgaagtaaatacataatttaattaatatttatttaaaacgtattgaaaacatcagatttcttgaggtccttatcaatttttgcagtcatctctgagaaaatgcatctgagcatctctcataaaaacttcgtttgattctaaaacatcctaacatgctaatgtgtgaaaaacaaactctagtaaaagattcaaccatcatgaagtatttattgctcacaggtaattttcactaacagcacaggttaaaaggagatgcttgatattatggctttggaatgcttttcctgcttaatcacatgctccttagaatcccataagctgctctgttgaggtgaacaaaaccaccatagggacactttctgatcctaatatgtatttccatttgccagcaacccctaggatctagtatttcctgccttagttcttgacatttattattgacatattggcaacctcaataatggagctagattgttattagtagtaatagtagtagaaagatattatgcctagtactttgtaagcacttattgtgggaatggcactaattaagagccttacataataatagtgaaaattactaccctgatttaatgcacactgtgtacaggtgccaccaaaagcacttcacatgtgttaactcatctaatcttcaaaattctatgagttagaaacaactattctcaatttgcaggtagggaagctaagacaaagagaggttaagttactttcccatgttaacggaactaataagtggccaagctggatttggtacccaagttgtctggctctaatgactgtgtttctaacccctacattacaaacctcattataaatgtctcttttacttacaaagtatttattaatctttttaacaagcttttgattttttgtattattatttctattttgctacagatgttatctctatttcacaggtttagaaatgtcatacagctagtaggtggtagagctacctttacccaacactgggttctttgatccatattttacaatagggcacagatctatttggcatattgtgctgaactagtcaaagagttcccacatgacaccgaaggtgattgcgtataagtggtggtgaatgaaagcaatgagatggtgccttgctaatatgcagacacctgccttgaattttatctagcacccttgtgcagagaattagaataaattaaaagagctttggggtaaaggaactaaataattataaattattgtcatttcatattaatttctgatctctctctctagatatatttccgtgtaaacagtctagtatgtgatttgactttttctataaatgtcttctgatagaaatgattcattttgtccatttcttggaagaatttaattctcctttagcattattaattaattaataagaaaaatttctcacaggcaaggtttaaaaagataatcctactaatgtagctataaatttctatagcccattctttgaaagagtatggcttttaatagagacttttaatctctaattctggtcttttgttaaactccaacccatacttctaactgcttcctagataatacatgttaatacacctgttatctgcacatgttcatcatgtttcccctctaagtcatgcatttcttccaaattccctacttagtctgatggtaatgtttgtataaatccaggccagatgtcatcttcagcctttctgcctttcacccctcacaaccaatcaatcagcaagttcttctccattttattgactaataaatgagtggacagtctcgcccctcctcttcagcacatcaacaccactgcaatcaactggaccaagcaatagcttactaaatgttcctgcctccagtcacaacctctgcaaataaatgttttcggaagacctacatcactctttttcttcttaaaggcctccccgtgggatgcaattcatcagccagcattctaaatggtgacagtaaaggcaaacaagcgttatcatttgtaatactaataacaaccaaccttaactgagctataaattgtcctttgtcttcaatgcttaatttgtttaatcttcacaacaacttatgcagcatctactgttactttcctagtgtgtagatgggaaaattgaggcacagagtagttatctagttaagtaacatataacatacattcattatgtaaaatgtcaaaaacaattcatatctttccaaaaagaaataattacacctgaagatacagtcataattacacacttcataaacagaagtaattatgctcacaatgaatcaaaattgcactttaaaattttttctaggagtgtgcttgaagatgatgcatctattaacaaagatactttgatttgttctttttcaacataaagaacatatagtgttattttgatttaatcatctttaaattgccaaattaagaattccagacaaagaaataaacttagagagatcacctgattcaaagtcttcattttaaagacccctcccccactgcacatagtgtttggaatgtttaagtgaaattcctgtgaaactcatggcttctctgtaccatattgtagtcaccagtgatgagtgcaccagattttactcatccttttcccagggatgaacgcttagatcgtctgcttcctgctattataaacaataccacaatgaccacggtatttgcttttatatagcatgtgagcattgtgaattttctaatcatgtataaagttaaagaccaataaataaaccataaagataaaagtagaagagaaagcaaagaggcggcccttgagttacaaacttacaaactccccttacataaaaataaattatcctttttttttctttaggagacaaagtctctctctgtcacccaggatggagtgcagtggtgcaatcatagctcgctgtaacctcaaactcctaggctcaagcaaccctcctgcttcagtctcccaaagtgctgggattacatgcatgagccaccactcccagtctggacttccatttctgactgagattgcatagagactgcacttcccacagcctctggaagcctgcgctctattcctgctgtacaccttacccaccccagctggccaaatccctctgtcacaaatatccccaacctcccatcttcactagagctctctgctaccattcccatggcagctttgtacctgcccctcaccactacctgagcccttttctaggaactactcagcagataggaaatagggctcctctgtggtggaagcaggaaggtgtgcagctagcaatctgaaattccgggtgcccttgtcctaagaaatactgagcttaaataccatgtgctatttaagcccctcagtactattaatgggaaaaactcaacttcaggatatactggaagagacatctgtggtgttgcagggaaacccaacaacaatgtagataactgtttagatgttctgatgtctgtagcaagtacagattttactccagaagttgtgaagttgtattttattctgctctctgaagggttggagagcgttgggtgaagggactcaagagtgtctagctttcctgtatacaaaattttaatcagttctgttttcagctccatcaattgcccctctgtttttgagcaaccaaatgcctccagttccagagccttctgatcattttttgaaacaatttgagttgcttttgcaggcacctgggtttctgctgctctttctctgatgagaaagtaattattcctgtgctttccacagtccagaatgttttaaaactcttcttgttgtatcttctcctattatctttgtctgtattcctttgcttttcttctagttgaacttcagtagggggtataaataaatatgttgttcaaacagatatagtaaaagtttagaaagaatctgtgtgttttactatttggttaatgagcttttactggatgagttgtaggagctctttttatattaaggaaatttagtattttgtcacatgtggtatgaatatttttctaatttgagcttttgtctcttgaattcttttgtcatgtataaatttttcatattgatttagtcaaatttatcagaattttttttcttcttggttttctcatgtttatgaagacccatttcaagactattaaaaatattccgggcttttttttttcagttttttagttggagaattttgtttgtttctttgtccattagtttatattttatgtttcaatttttgaccaacctgaaatttaatttggtgtaaggtgtgaggtaaggctctagtattatttttttctatctggcttctcatttaatgaataatcagttgttctatttctcctctcatttaaaattatctccttatccatgtgctaaatctcagtatccacatgctaatttgagctttattttatttcattcattctttgtctgctaatataacagctttaattactgtatatttataatcaatatctggtgaaatttgtcctctctgcttttcttcttcacaaaattttaaattattattatacttttactttttctgaattatatttttaaagtttttgtaattcaaaaagactcctacacaaacttttttaaaagttaagatgaaaaatgtatttatcaaccgcctaaaataattagattattgtttataatagtttttcacttgattctcttatgggattttttaagataacaacaatatatctgcaaacaatgatttctcccacttctctaattcttataactcttctttttccagaaagtgttaaataataatgttgttgatgggcatactcttttattctgattttaatgagaatgcttatggatctcatcatcaaaaattatacaagcttttagattgaaatatatcatcagaatgtatggaggtgatatagagtttttatcttttatttgttcatgttgaactttaaacattgtctttagccattttcaaggaaaaaaaattcctgttgtttggttccttaaccaatcacaggatttccagaatcttctttggaaccatcaactccatcctgcattattcttttctttctcagtctcagctgccataagaatgtggaaaggtgtggatgacaactgaaccaacccctgacacctctatcacagacatttccatttatttactgtgtagtgtgatatggtacctagggtcatataaattcatattaaaaatttagtttttggaaatgggtatctcatactttgcacacattggcaagagtgccttttgtgtttagcacaaaagagataatattaaaacactatgtattgaaaggttggggacaaatttgctaaggtgaaaaacacattagacataaaaacagatgacctaaattctagttatatgtttacctgtggccatctttccttggagtggtcatttcactattctgagacacaaagataatgagtgaaagaggtcactgtgaattgtaaagcaccctaccaatgtagtcattatcttcaaactttatgtatgttgcaaatctttaaaattcttgcaaggagctatctccacttataatagagatttgaaagatctcatttcaaaatagcttttaaaccatattttttcacatcagttaaaccactaaaataaggttttgccttatacaaaatgacattgtagcttaagtcatgcaaaccagaaaaaaatatttatgtatgtgattgatcagattgtgataatcttatcgtaatttgcgtggaaaaatcattttaagttatttgattaaaccaatctgcagtgagtattctcaaagtcctaaaaatattttaaattccctttattttcctatataagtcaaatacgcaacagatcccagcacagatttgtcagaaaatccagtgtcaggtagttttttatgatctctccttgggaacttctagaaattctaggacatatgtagcctagaaatgtggtgctaatttcctctgatcctcacatattgtggctgcaactctggcactatgtcctctgggccatgaggtccattaaaataagtgtagcttcattaagcccagcttctctaacaacacacaattccatgccatgtagggtggttagatgcaggtggtgcctttcaacctttaaactcatgacttcctatctttcctgaacccactgttctggatattaccttactattttctttttttttttaaagagaaaagaggctctcactctatagcccaggctggagtgcaatggtgtgatcatagccactgtaacctggaactcctgggcttaagcaatcatcctgcctaagcctcccaaatagctaaggctacaagtgcgagccaccatccctggctaatcattttttaaatttttttgttgagataaggtctcactctattgcgcaggctggtcttgaactcatggccttaagtgatcctcccacctcagcctcccaaagcactggtattacaggcataggccatcacacccagttttacttttcttttcaaagcataagcttccttacttcaaggtcttgagaaatttgcagccacgtccctttaaaatcccatgtctcaaataaaggattttgttgggaggttgagaaaaatcttcagatagtaactctagaaacataaagaagctgttaattcctcctgaggaaaaggagcatagaacatagaagcctgtgtgttctctaataacctttccaatctttccagtcttctataacagcaaacctaagacagaaatgaatagctcaatcaattatcctgccactaatcaagtttagcagtcaagtcatgtattattctgttcaattcttaaaatgtatgctaaattaaacaatgagaggacagtggcttcatatgttgttaaagcctaggttctggttttggtatcactctttatatcctgtgttcttgggcacattattgatttcatcatatttcacaagattgttgggaggattcacttaaatccattttcaacagccttttttcataggaaattaagccctaatgctcttaagccattgtggatataatgaattaatttctctcttatgaattaaggaaagcactagttatgtaccatctttgaaagaactgagaagatggtcattcaaatcattttcagtgccctatgattcagatgaagaagaaacatttttaatggatgcaaaaggttaagatatgcttttgacgtcagattatttgggttcaaatcgccaattctactcttattagctgtgcatccttttgttgttgtgggtgggggtggcgctctaacttcctcacacataaagaggtgatggtaatggtagctatatctttggatttatacatgaagacatgttattatattgaaagaaaattaaagcaaataaacttcctcccccaaaaaaggacatgtcttctttgatctttcatatatttaagtaaaatttagtataaatacaagttaagtcttatcaaaaaccagaagtgttttggattttggaatattcgttctatgtcagttgagcatctctaatcgaaaaatccaaaatccaaaatgctccaatgggcatttcttttgagtgtcatgttagcattcaaagcgttttagatttcagatttttagattagggatgctcagcctgtatcaggaagctgtaccatctctctgaatgacgaggactatattctaaatcttaagtccagcagtttggataaaaattttccctggaataattatttatccaacatattttggctaaagtatatctgaccagacagcgttagacatgttaagagaacaatgtttcatcccagctgataaaaaaacgtatacgatctggaaagggagataagatatctaatcagtgaacgctattacatggtgaatgcttccagaatgcataactaagatattacataaactcaagagagaaacattatttctaatcaataattttaagcacacatccatgaaggatctggcattgaactcaatcctgaattatcagtggtatatgcacaagttgaaaaggggtccatggtataaaatatctaactggagatattgacacgtgttgataaatatgggcaagtattctggtttcattggttaaaaaaaagcaatagtatgagatgagactggcaatataagatgaccccactatgtggaagatgaaagttgccaaggtatgtccaaattagtatttagtctgcattaaatagataccacaccctataccttcagtcaacagtttatttcttggtgaactaattaatttttttttccttttgtaggtttctttggttagcctggtagccaatgctcttggctactcagaactcggtgccatcaaatcattacggacattaagagctttaagacctctaagagccttatcccggtttgaaggcatgagggtaagaagaatagacactctaattattcatgtcaaaattacatgtaggtaatgatttagatagaaaagggtgccatactcttctgatatttatttcatagaattacagaattagagcaaaaatcttagatatcacaaagcctagccttctgaaactggagtttatttaaacaggctctcagaattttgggaggacagaactgagactagcatccaggtcttcttgtcacagttcaaatatgtttctacaacactcaaaaaccttggactgccagttgtttcttttcattgcttacaccccttgaaatgactactgactactgacattcatccgtggtggggagtttctttctctcaatagtttgattccttcaaaattactggcaatgaatgaaaggtaaaatgggttttgtgtgctttgcttcttgaattaatatcagtaataaaaattattgcataaggaaacaacattgaattttagcctctaacaaattgctaaataacatccaaagtgaagggttaaggtaattaagcatttcaggcaacctccagagttttttggtttttttgtttgtttgtttgtttttagacggagtctcgctctgtcgcccaggctggagtgcagtggtgcgatctcagctcactgcaacttccgcctcccgggttcacgccattctcctgcctcagcctcctgagtagctgggactacaggtgcccgccaccacgcccgctaattttttgtatttttagtagagacggggtttcactgtgttagccaggatggtctcgatcccctgacctcatgatccgcccgcctcggcctcccaaagtgctgggattacgggcatgaaccactgcgcccagcccagagtttgttttatagatctttttttctaattgagcattctgaataaggttcactttttctatagcagttgtattttcctccccagctctcttccttaatatgtatattatgcatctaaacataaaatcacactttattatagataccacccatttgccatgcccctcggtagaattcagcacaaaggccagttttgtttaatctggcttgtgagtgcatgtggatatttaatttagtctaggtgatagggctttcatgttaggatgttaggagatggttggtttggggcaataaaaatatttcaaccttgactttaaagttcacccatcagggagaattaagccactctccagactctccagaatcattgtaatcaaagaaatatttggtttttacattgtaatttcatttccttgctaatgctaaagaaagttagacaagataaaattcataaaaattactatacaatttcaagttcttttcaaaccaaacttttaccattactcataatacttaagctctcatttggttccatgtttcctattaacagttcatttatgaggggagatagcaactgagcaaaatttaaaacttataaattttctctaatctgaaaaatattcaaagtttagaatttttaattcagtcatatagcacaattaatattccagatgcaaattatgataatgtattatgcatttacttgaaaacaggagaacctgtggtggtgtgtaccaaacttgtccaacccgccttattttgttattgttgttgttctatattgttttaggctactaacagcctgaagccatggtttttagtttctatctctagtgataagtggaaaagagggatgaggaagggactttacgggcccagccagaaacagaaactaagaacccagtgaatgcattctctccctggcaagtataatgcatatggcttaacttccaaaagaaacaaaattcaagtagcataggaaatgtttacaattttggatttctggttttgatgtcaatttaagattccttggtattgatttctaaaataatgtttgcagtattttaaaataaaacaatacttttatttaacataaatgattaacagaatggtccaatatgaactagattagacaagaaaaattactgttgactttcataaagatttcaaaatacatcttaatatcttctgaatttaatgagaagtgaatgaattttcctctcatgaaataggtcagcctgggttgatgaagtagcatgtgctccaaagtgaacatttaagagattgtgaagtaataataatgggaacttatccagtactgttacgaccagatataaattccactttttcccctaacttaataaacctttttattgagatttactaacagggggaaaaagggacccagtaaattcctaatcctgttcttcgtagtcataaaaagttaacttgatctgagaatatagatttaaggcatttttaatactttgtttatttgcaaagggtttgtttactggctttttcaaattatcattcattcattaacactcttgaaaattaaaatgtattactgaaagatgattattttttctgttggcatttaatgcatctttctattcttttttccccagcatacaaacattttctgactccatcttactataccaggtttttaatgatttcttttcatactgtagcatattttgctttccttaaaaccttagctctttagttgtgtcattgtttgttttccttcaaatatgtgctagaaaaattagaagaaacaacttgtccacctagatttttatttaactcttttcaagcacatattaatactaaacaaatacattgaaggaatggtttccattcaaaaggtttgtaagctatgttcccctcgctgtctcttctaggtggttgtgaatgctcttgttggagcaattccctctatcatgaatgtgctgttggtctgtctcatcttctggttgatctttagcatcatgggtgtgaatttgtttgctggcaagttctaccactgtgttaacatgacaacgggtaacatgtttgacattagtgatgttaacaatttgagtgactgtcaggctcttggcaagcaagctcggtggaaaaacgtgaaagtaaactttgataatgttggcgctggctatcttgcactgcttcaagtggtaagtggctactgtacgagttttgaaaaagttttcaagatgtttcaaggaagattatttccctgatgttcttcgtttgaatgactaacatttgacagcatgaaaaaaagttaatgataacacctataatatcagcttgaattgatcataaaaaagatgttacaattattttataatgtattttccttagtgttaagcttttagtatgttttaatgtgattttatatttctgctttcttttttgttatatttttgggtactggtatcatttttagttttctgtatcaattattgccaaaggagcaactttaggtactaaaataacaatgcatatttgtagtgatgaattaaatgtataaattattagccagataatttattataacaatgtctaagaaatatgattctactatgtgtcaaaatgcaaatcatagagcttacactttaacatataagggaattgggactgagatggcagtttcatgaataaagtctttcactaaattttagtgtaggaagaaaatagaatactttcaagaaaaaaaaggaaacaagttccagactttaaatacaaatgtttttctatttcaattttatttcaatctcttgatatgaaatttcacaatattgtacaaaaagttatttgttataatactgtcagattttcatctggttaaatgtcattgttaggtgaaatttttatgaacaattcaaatatatgttatttacaggccacatttaaaggctggatggatattatgtatgcagctgttgattcacgagatgtaagtatcactcaaatattatttataggttctagatttcttatggtgaatattggtggtaatttaaacactgatacatccaaaattctatattagaacatttaatattgcatataaaaaatgaacagtctgcttcaatatagatgatgcttgattaatgtgtgcctaatatacaatatgtagctaatatgaaacgatatctagctgcatggatcctaagacattagattggtccagtaaatgagactattctgagtggaaaagttgttcagtggggaagtaacttgtctctccctatccctggagagtatgataaaccagactctgtgaagcagcttccaagaatatcatgatacagaaaagcaagcaagtttcagggacactcaatttagaaaataaaaataaaaataactccacagaatatatctgtgctgaattttcctcttagaagttgatgttctgctcttaaagccgtatttccaaaattcagcatttccaaaaccaaacagaaaatactgcaaaaaattatgactaataataggctcaaaatgttttccctgcttatatcaccgtatttatgttaaagaatatgttaaatgtaaggcacaatgggaaaagagaatcaagaacaatcataaaacttgcaaaccttcattttactagatcatactagttttaaaaaattgtttttgtagaacaatatctcagggtaaggcaaaagtagcactgtattaagtaacagcactcaataaattactgatttagtgtaagtatttatagtatttttcatattatttaatattttcaatatcatttaggttaaacttcagcctgtatatgaagaaaatctgtacatgtatttatactttgtcatctttatcatctttgggtcattcttcactctgaatctattcattggtgtcatcatagataacttcaaccagcagaaaaagaagataagtattctttagcttttacctttcttcattctggggttctgtctgttaatacagccaaataaccagaatacctgtggtcatgacagacttaaatcatgtttatattattttcagttgcccatgtggttatttaagctgcagggattccagcctctagtcagtggctcctctcaaagtttatctattggatagctttctgacccaaaaatgtgtccactccttcggacccatccaacgggtctccagtgctttagcttggcttacagagcctttcaggaattacctccacccagttttccatcttcattttttcctacacttcactctatacatgtgtatttccctactacatagtcaccacccatacatctatatgagctttctgcccttttctgaacaagcattctcttgtacctccatggctttttgtgatttttttttatcctggaatgttcctagaaaacccataatcatcttttaaggcctagcttaagggtaagctatgtaacagcttgtctctgagtctctgaattcattgttgcctctgcagtacatttaatttttttgtcatatcaacatacactgtccacctacgttttcagtttcctgctccatttagaagcagaatactgtatcttatatatttatgtaattctgacacccagcacattgtctagcacacagaaagtgttaaaaactgttgaatgaagaagtaaaattatcggcagtgaaatggactaagaaaatgttttctgttttgcaaaaatatatttgagacccttgtgcctacttttaaacatagtataatcaaattaggatcctgtagcgatcagagttttatgtacgtaaggattttgcataatattaagatattcagaatttcacataaatgggaaaagcaggataaatgtatatgtaggaggataatatccacttaaaaattagaaaagattaaaggaaagacaaatattttttgtgaaagtactattggaacacagaattgtaaccagttttatactatgtctttactttggaggtcaagacatctttatgacagaggaacagaaaaaatattacaatgcaatgaagaaacttggatccaagaaacctcagaaacccatacctcgcccagcagtaagaattacttgtctcctttaatgttccaaagccatgcgtccatatggtcaaattgagcaatgctctggagcagaacatattaggtgatatcaccaatattgagccctaattataaagttcatattttgcatcataattcacaacttctgcactcattaggagttaccacattccaaaaaaaggaggtaatgttctttataatttgtgagttgaaaacttctagctcagggttcctaataaatacttccaaagcaaggttcactttcctgctaccaacagcacacctggttcctcctcctctagccttcccatcccactctccaaggcctccctctatactctctgctccctccattcttaagactagaaaatattccaaacctgtttagaaagggaaaaggtgtcatcaaaattgtttgtttcaccaaatacaccaaaacagaataaggcatattcagaatgcatactctgtagagcctcatgatgatggaatgatgtaataatgacagattatgttcacagagctggactctaactcagctattttctgagattggtaaggagtaaggaaactgaggcccaaagaacatacgaatcatgccccaagtcacaaatcttgtaattgccagaactgggacttgacaaggccccataaattctctaagtgacttgactttaccatatttataagagtagttggagctggaatgtgagggagcagggtaagaggggaaaggattgaactgactttactagagttctttaaaaattaaaacatggtcacttcatgacctttgatttttggtaagccatgaagttttaagtttttactctaaatgattaataatatatttctttaataaaactgtatttactagccatattaatataagaatctttgaaagcatgttgttcctgagatgattgttaataagacaaagaaaaaaagtgtttaaagtcatgcatttttgttaaagcacagggcataggtaaagaaggacagatggaaagaaatacagataaattaacaagcccatacatagattcacagagctagagaggtagaattcaatagaaatatgactgatgtatttcaggggagggaaataaggtataaaccaaaatttctaaaatattgataaatgaattggtgtattctctatctaaatatctgttgatattaacctgctttgtaaatctttgttattagtagtcactattttttataaaaattatcatacttattcaaatcaagcaaagactacatatattatcagccaattgtcacaaatttatgtgtttgtttttgttttgttttttaagagacagggtctcactctgtctctcaggctggagtacagtggcaagaccatagctcactgcaagttcaaacacctggggtcaagtgattcacctcagcctccctcgtagctgggactgcaagcctgtgccaccataccaggctaatttttttttaatagaaatgaggtctcactatgttgcccaggctggtctggaactcttggcctcaagagagcctccagtctcagcctcctaaagtgctggaattacaggcatgagttgccacgcccagccttaatttatgtctcatccagctttgtctttccataggacctatataaaccaaatatgctttgtttagctatataaattttttttccattttttttaacatgaagagaaaaaaagcacacaaaattgtttggggtaatatgaggagggtgcacatccatcccgtatgtggaagggctttatctacaattttactgcattattctttatgaaatatatatagtaaccttatttctcttctctcactttctagaacaaattccaaggaatggtctttgattttgtaaccagacaagtctttgatatcagcatcatgatcctcatctgcctcaacatggtcaccatgatggtggaaacggatgaccagggcaaatacatgaccctagttttgtcccggatcaacctagtgttcattgttctgttcactggagaatttgtgctgaagctcgtctccctcagacactactacttcactataggctggaacatctttgactttgtggtggtgattctctccattgtaggtaagaacagcttaattaccaagaggtatagttacagagaaacagttgccccaggaccttctagctgattaacatggaaattaggtctgagaataataatgcatatagatgtaaagttcaacactagcatatttgaataaaaactctgaaacctgggtttattcacaaagctaactagttagaaaccatgttaggaataccagatttgggaaagaggtgaagaagacaggaaataaacattatcaggtactctcctaatcttaaaccaaggtcacaggctaaaagaggcagatggcttaaaaaacaaatcattgtaatgcaataaagttggtattgtaagaagcactgaagaggaagtagccatctctgctggaatgagttaacacaggcttccagagataaaggtgatgcatcctaggtgggtcttcaaagaagagttgagatttagtaggagaaaaagagagatggggaattatagaaccccaaatttagaaacttcaactttaacctcatgtcaaatatggcccatttctctctaactgaagagtatcattaaaaaatagaaaacaatatattcagagatttcagaaatatttttgtttgtaattgccacaattcatgtgtagggataacaattcatataaattgggtctatataatcttaaattgccatgctaccattggagattatttggattttgcaaaaattcatattggtttatgacattacagaatcactgaataaaactctgtaatctgtaattgctaatgtcagggagtggatccaaatatttaataaaggctcatattcataacaagtttgttgtgttcatagaccttaaaaaagataaagccatcatgtaagtgaaagatattatctgtttagctgtgttctatgttttccataggtatgtttctggctgagatgatagaaaagtattttgtgtcccctaccttgttccgagtgatccgtcttgccaggattggccgaatcctacgtctgatcaaaggagcaaaggggatccgcacgctgctctttgctttgatgatgtcccttcctgcgttgtttaacatcggcctcctgctcttcctggtcatgtttatctatgccatctttgggatgtccaactttgcctatgttaaaaaggaagctggaattgatgacatgttcaactttgagacctttggcaacagcatgatctgcttgttccaaattacaacctctgctggctgggatggattgctagcacctattcttaatagtgcaccacccgactgtgaccctgacacaattcaccctggcagctcagttaagggagactgtgggaacccatctgttgggattttcttttttgtcagttacatcatcatatccttcctggttgtggtgaacatgtacatcgcggtcatcctggagaacttcagtgttgctactgaagaaagtgcagagcccctgagtgaggatgactttgagatgttctatgaggtttgggaaaagtttgatcccgatgcgacccagtttatagagttctctaaactctctgattttgcagctgccctggatcctcctcttctcatagcaaaacccaacaaagtccagcttattgccatggatctgcccatggtcagtggtgaccggatccactgtcttgatattttatttgcctttacaaagcgtgttttgggtgagagtggagagatggatgcccttcgaatacagatggaagacaggtttatggcatcaaacccctccaaagtctcttatgagcctattacaaccactttgaaacgtaaacaagaggaggtgtctgccgctatcattcagcgtaatttcagatgttatcttttaaagcaaaggttaaaaaatatatcaagtaactataacaaagaggcaattaaagggaggattgacttacctataaaacaagacatgattattgacaaactaaatgggaactccactccagaaaaaacagatgggagttcctctaccacctctcctccttcctatgatagtgtaacaaaaccagacaaggaaaagtttgagaaagacaaaccagaaaaagaaagcaaaggaaaagaggtcagagaaaatcaaaagtaaaaagaaacaaagaattatctttgtgatcaattgtttacagcctatgaaggtaaagtatatgtgtcaactggacttcaagaggaggtccatgccaaactgactgttttaacaaatactcatagtcagtgcctatacaagacagtgaagtgacctctctgtcactgcaactctgtgaagcagggtatcaacattgacaagaggttgctgtttttattaccagctgacactgctgaggagaaacccaatggctacctagactatagggatagttgtgcaaagtgaacattgtaactacaccaaacacctttagtacagtccttgcatccattctatttttaacttccatatctgccatatttttacaaaatttgttctagtgcatttccatggtccccaattcatagtttattcataatgctatgtcactatttttgtaaatgaggtttacgttgaagaaacagtatacaagaaccctgtctctcaaatgatcagacaaaggtgttttgccagagagataaaatttttgctcaaaaccagaaaaagaattgtaatggctacagtttcagttacttccattttctagatggctttaattttgaaagtattttagtctgttatgtttgtttctatctgaacagttatgtgcctgtaaagtctcctctaatatttaaaggattatttttatgcaaagtattctgtttcagcaagtgcaaattttattctaagtttcagagctctatatttaatttaggtcaaatgctttccaaaaagtaatctaataaatccattctagaaaaatatatctaaagtattgctttagaatagttgttccactttctgctgcagtattgctttgccatcttctgctctcagcaaagctgatagtctatgtcaattaaataccctatgttatgtaaatagttattttatcctgtggtgcatgtttgggcaaatatatatatagcctgataaacaacttctattaaatcaaatatgtaccacagtgtatgtgtcttttgcaagcttccaacagggatgtatcctgtatcattcattaaacatagtttaaaggctatcactaatgcatgttaatattgcctatgctgctctattttactcaatccattcttcacaagtcttggttaaagaatgtcacatattggtgatagaatgaattcaacctgctctgtccattatgtcaagcagaataatttgaagctatttacaaacacctttacttttgcacttttaattcaacatgagtatcatatggtatctctctagatttcaaggaaacacactggatactgcctactgacaaaacctattcttcatattttgctaaaaatatgtctaaaacttgtttaaatataaataatgtaaaaatataatcaactttatttgtcagcattttgtacataagaaaattattttcaggttgatgacatcacaatttattttactttatgcttttgcttttgatttttaatcacaattccaaacttttgaatccataagatttttcaatggataatttcctaaaataaaagttagataatgggttttatggatttctttgttataatatattttctaccattccaataggagatacattggtcaaacactcaaacctagatcattttctaccaactatggttgcctcaatataaccttttattcatagatgtttttttttattcaacttttgtagtatttacgtatgcagactagtcttatttttttaattcctgctgcactaaagctattacaaatataacatggactttgttctttttagccatgaacaaagtggcaaagttgtgcaattacctaacatgatataaatttttgttttttgcacaaaccaaaagtttaatgttaattctttttacaaaactatttactgtagtgtattgaagaactgcatgcagggaattgctattgctaaaaagaatggtgagctacgtcattattgagccaaaagaataaatttcattttttattgcatttcacttattggcctctggggttttttgtttttgttttttgctgttggcagtttaaaatatatataattaataaaacctgtgcttgatctgacatttgtatacataaaagtttacatgaattttacaacaaactagtgcatgattcaccaagcagtactacagaacaaaggcaaattaaaagcagctttgtgaacttttatgtgtgcaaaggatcaagttcacatgttccaactttcaggtttgataataatagtagtaaccacctacaatagctttcaatttcaattaactcccttggctataagcatctaaactcatcttctttcaatataattgatgctatctcctaattacttggtggctaataaatgttacattctttgttacttaaatgcattatataaactcctatgtatacataaggtattaatgatatagttattgagaatttatattaacttttttttcaagaacccttggatttatgtgaggtcaaaaccaaactcttattctcagtggaaaactccagttgtaatgcatatttttaaagacaatttggatctaaatatgtatttcataattctcccataataaattatataaggtggctaattggaa

SEQ ID NO: 672 - DNA, 96665 bp, Homo sapiens
atggaattccccattggatccctcgaaactaacaacttccgtcgctttactccggagtcactggtggagatagagaagcaaattgctgccaagcagggaacaaagaaagccagagagaagcatagggagcagaaggaccaagaagagaagcctcggccccagctggacttgaaagcctgcaaccagctgcccaagttctatggtgagctcccagcagaactgatcggggagcccctggaggatctagatccgttctacagcacacaccgggtaagagctactagtaggaatgtctgctctcagctcttggagaggaagtctcggtcccacccagcccagaaagtcctccttggccctgggtgatgtggcagtctgctaaagattccgttaacaaccaaaaaaaatatatatatatatctctaacttatttgatgatctctttgaatttttatgacatttatgatagaaactaactaaacccacatcttcaaaagcagataactgctgcagagctttcagggaaagttggctgttcccttggatgacctctggcctggggcctccagaggagttgggtctctttgcaggtggagagcagacatcttgaggttgggggaggagcatggcggtgaggacagaaagcaggatgaatttaagccagtggtcctcaactatgatcttggaacccctggtgtccccaaaactgttttagtgggtttataaaatgaaaactattgtataacaatacttggatgtaatttgtctttttcacacactttctcttatgatcatacattggtgaatatagaggctattgatgggggatgatgtcatcactctaaaagctactggaatgtgtgcctgtatattcccgtgttttaaaatttcctgagttttgaatttctaatatgagatatatatacacacacatatgatgtatatatgtgtgtatacatctatacactatatatatacatacaactatgtatatacatacaactagaccatgtagctagttatgtatatataggtatataagcatatatacatatatattaatttctaatatgatatacatatatctggcataaacaaaaaggtatcaacataaacaaaagttatttggggtcctcaataaggtttgagagtaataatccctgaaatcaaaaagtttgagaatcagtagtttaaacaagagcttcttcatgacaattatctcacctgtgttgtatttttgatgttctacgagccaaaaaatggtgaatgcatgtttgggagttaggaggacaggaatcagccatctcaaatatggctagcagagtaaataaaaaggcactgaatatctttcttcctcctctcccatgccaagagttcatatcctcctaaatcctcagagggagaaaccaggagaggatttaagagacagagatgtagaaggtggagacagaagaaacattacaaaacaaggatggttctcttgtcagaagagaaattaaatgcaaccataacttcaccatcctgttgccagagtcctcccctgggcataacacctcttaccagcctgaggattggctgtctgtccattaaagtaccctcagtgggctcatcttggtgcactgtcagtcccagagatgaggatcttgctgagagggtgaggatatggcttttagtccttgatcctctctgcctctctgtacctgcatttgactctcattgacctgtagttcccagagcccttcttgctcataagcctgagataatgcctctcatgtttaaaaacatggttgtataaggaatcttgtttctcattggaggtccactttctgttttgttttgtttcagacatttatggtgctgaacaaagggaggaccatttcccggtttagtgccactcgggccctgtggctattcagtcctttcaacctgatcagaagaacggccatcaaagtgtctgtccactcatatcctttgcacgattgcctcttccacgtgttacaattagaccttgcctactgtgtccagtaccttctttagaggttagcaacagagcccttatccaattgaatcccaaaagtacaatgaggtcattagattgaaaaaatggcttgggcctttaatgtgtcccacaccccaaagcagtcccaagacacagaagaagtgtttatgcaacacacaggtggtttggattcacctcagactaatctagacacacctgtggatgcacaacttgaaaaacatcctctttatgaggggaggtttgctgatgcccccagacacattctcaccacggtgtgtggtccgctttccccacaacacaacaggcagtaagagggcccaagccttctttgggcagatgagataggcatgagttgttgctctgtgccatagccatgctgagaagtggctgcttactgggcaaaagagcagcacctcccagagggcaaggaaaacagaccatgatgggaagagcacacatagtctcaatgggacctcattggtcatggggcactgttaacatcacaaattactcaaaaactactagcaggtttaaaatgtcaataatctgatgttcatgccatacaagactgtaatgattagagacacattggtcaaatgtctactatatgaattgttttaggtaatgtcagaagctgctttcaggggattttgcaaggcaagccaaactagtagaaaaaagatactttggtttggtttcctaagatcttcctgggtgatcctaatggaaagatcctaatgacctaagatccttggtcatcggaaggattggaagttctttatgacaaatttagccctggcttgcaggaggttgatgtacaagaatacacctgcctcagttgcctgacaaatggtaaccagccttttcttagaaggcttcagtaaaaaagagttctaccctgctccctaactctgaggcagattgttggatttctggacagttgtcattgagctggtaaccttggcacagtcatctatctgcacactcaacatgaagctgcacagcttgatgaagttgcattacgttttctctttttacatttttttctttctggctggccagcaagaattacgttttctgagctgaatcttgaattttcagattctacagaaggatatttaatgacaatacagtctctcacttgctaaatacttcctaagtgtcaataccatcatcagttcaaaagcctctgaagtagagattaccatccccattttacagataatgaaactgacacacagaggcattaagtaaattatccaagaccatgtagctagttaagaagtccagcctgcatcctgcgtagagcagtatctacagtgaggaagtagggtggaaagtaatcagggtaattattctctcaatgtgtcgtctctgcttgggtagttgttgctttttcaaaatatatacaattacatggaaattacaaataaagagaaatcacaaacatacaaactcctctttatggattctggttgaattacatctggataagtaagaaacagctaattagaaataaaatcccctaaaaagaaccaagtgaccagtgaatattctcttcatcttgagatttgatgagtaaataattgcttggtagagtcacagctggacagaaaagctgttgagggggtctcttcctcacaaaagtctgcatttaaatctcataaatttggtaactccagccccaaaagatactagaattctcagggccctattattaatatttcaccaaaaatataattctaatcacatttgctatgaatgttttcataactaatattatacataagatatattacttttaaatatttgtagaattggagacacgattttagtttaatccttggattaacatttccccccatgtgagcatatttcttaatttaattgtaagtcagcaggaaaatgtggtttaattaatagaattttccttttcataatagatgtgttcctaagtaactgtaaaactagacacatcaaggcatttacagaaaactaaaatacatttaaatacttctgctcaaattgaaaaatgagtgttgtactctctctgtaggtcaagtttatcttcaagttttatttttccttaggaagcactgttgggagcccagctattcctaagaaaaatgtccaagtgggaacaatttacctttagattctccccaccaacatttcttcccttctattttccccttccacccaccttcctttcaatgtctccctccccttttgataatccctttgcccatagtctgctgtcaatattctccactctagctattcagagttctccactccagcctaatcctacttggggttttcttcctgagccagtatttcatttccctgtgcctgcctccaccgttcctacccagaagaccatttcctcggtggaactgatctcaactaagttacccaaacaatctgatgaaactaattcccatgaaagtttgtacctcttcacttatctccaagtttctaacttttctttgtcttttagaataaaaaagacatttgccagatgaaatttcaggccattttgtatactgaaatgaaggcttcggggcagaaggacattttggaaaagggagtctgtttccttctatcttgctcagagtttgttatcaaacagataagagttcacatctctgcagcatggttgactagctgcatgacctgagaaaagttatttaacttttattttttgtcagcctgtttctcagcttcaaaatgtagatatttatacccacctgtagatcagttgtattagaagtaacatggacaaagtactcagcctagcttaggcactcagtaaatgttagtggttattatgtgacaagatcataaagctaatattggctaagatttatgaatgtaatcattcagcatcaaggtgatcctagatgacatcacagagacttggtgatctcagcttttccttaacacaggcctttcaggtggttcagtttatttattacggtcactattttggttaattgtgtgtgcatgacccgaactgaccttccagagaaaattgagtgagtagatttgctatcattattgtaccatctctttttgctttcttttcttccttcacttggcagtctttgtcttttatttatcctgccatgcctcatgtgggtaatgctgaatctcattgtctatatgtctttgtaataaccaggtctctccttctgtgagatttgtttcataaacatacatgattttcagtttcaaagagatacagattagtggttctcaactttggctgcatattgcaatttttggggagattttttaaatgcctgagtcccagccccagaaagtctaaggtggcctgggaagatgagtctcctcgcccccacccccccccaacacacacacactcactcacctgctagatgcacacacaaatgtatgccttagagaaggtatgcttttgagaaggcctgctatgaaagagagacaggagcaaaactgagacagaactaagaacaaatggctctggagtatatttagaaaataactcataaatgaagctgtttaagttatcatgcttcatatgcctcaaagtaaccttagtattcctgaagttattctatttccctaggttagtgggtgaaacccctatagtttcagaatctgggagttttccaaaaacattccatatccacacatctgggagggatgcttccactccagcttgaacctaacatacctttggttataataacaggtgctttgcagagctttctttttttttttttttttttttttgctaatcataacagtaatgcatgccacaacagaaaatacgttatatttttattaatagattaaaggaaaaggatcacatagtcttcttaattgatgctaaaatcatttgataaagtttaatttccatttataattttaaattcttagaaaagttgaaatagaagggaataaatgtggcacatatacaccatggaatgctatgcagtcataaaaaaggatgagttcatgtcctttgcagggacatggatgaagctggaaaccatcattctcagcaaactaacacaagaacagaaaaccaaacaccgtatgttctcactcataagtgggagttgaacaatgagaacacatggacacagggaggggaacacactggggcctgttgaggggtggggggctaggggagggatagcattaggagaaatacctaatgtaaatgacgggttgaagggtgcagcaaaccaccatggcacgggtacacctatgtaacaaaccggcacgttctgcacatgtaccccagaacttaaagtataataattttaaaaaggggattgcatcactctgataaagggtattcattgttttaaagtatcaagcgtcatacttaattgtgaacatggaaagctttccctttgagatcaaaagaaaaaaaaaccaaagatgtctgttcttctcagttccactttgtaaaggaggtctcagccagcatagtaaagcaaagaaaaaaaaagtgcaagaagaaaaaagtaccgaagatgtaatttacagataataagattgtatacataaaatatccaacataacctagagataaacagtaagaattaataaaagagtatagtaaggtagctgggtacaaattaacatacataaatcaattgtgtatagacactagcaacaaacagaaaatagtttttaaaaataccatttacactggcattttaaaatgtcaagtatctaggaataagattatcaaagtataagtgagatctctataaggaaaattataataagtattgtgtaaagtttttaaagaaaaccaaatcagtggggagacatgttctcagattcaaagtctcaatattgtaaagactcccaaaaatgattaataaatttaatatgatcctcaaatcaatatttcaacaggcttcttttggtattacttgacaaactttaaactttaaattttcttcctcaaaagtttacatgaaattttaaagagcaaattatagccaagaaacttttgaggaagaaatacaaagtgggagaactcattctactggatgtcgagatttactataaagctctaattgaagcagtgtgccattggtgtaagattggtcagaataatgtaacagcatagacagtccataaacagaccaacacatatgtaaacatctaatgtgtgaaaaggtggcaccccagaacagcagggaaaaggcggtcttcaaaaaatgatgctgaagaattaggaatctcactggaaaaactacattaaacatccaactttgcaccacacacaagaatcaattctaggtggatcaacacctcacttgctttgtgaaatgcaaatatataaagcccttttttaaattttactttaagttctggggtacatgtgcagaaagtgcaggtttgttacataggtatacacatgtcatggtggtttgctgcacccatcaacccatcatctacattaggtatttctcctaatgctatccctcccctagcccccaacccctcaacaggccctggtgtgtgatgtccccctccctgtatccacgtgctctcattgttcatctcccacctatgagtgagaacatgcggtgtttggttttctgttcttatgtcagtttgctgagaatgatggtttccagcttcatccatgtccctgcaaagaacatgaactcacccttttttatggctgcatagtattccatggtgtatatgtgccatattttctttatccagtctatcactgatgggcgtttgggttagttccaagtctttgctattgtcaatagtgccacaataaacatacgcatgcttgtatctttatagtagaataatttataatcctttgggtatatacccagtaatggaattgctgggtcaaatggtgtttctggttctagatccttgaggaatcaccacactgtcttccacaatggttgaactaatttacactcccaccaacagtgtaaaagcattcctatctctccacatcctctccagcatctgttgtttcctgactttttaatgatctccattctaactggtatgagactccatctcattgtggttttgactggcatttctctaatgaccagtgatgatgagctttttatcatatgtttattggctgcataaatgtcttcttttgagaagtgtctgttcatatcctttgcccactttttgatggagttgttttttcttgtaaatttgtttaagttttttgtagattctggatattagccctttgtcagattgatagattgcaaaaattttctcccattctgtaggttacctattcactctgatgatagtttcttttgctgtgcagaagctctttagtttaattggattccatttgtcaattttggcttttgtcaccattgcttttgatgtgttagtcataaagcctttgcccatgcctatgtcctgaagggtattgcctaggttttcttctagggtttttatggttttaggtcttatgtttaagtctttaatctatcttgagttaatttttgtgtaaggtataaggaagggatctagtttcaattttctgcctaaggctagccagttttccccacaccatttattaaatagggaatcctttccccattgcttgcttttgtcaagtttgtcaaagatcagatggttgtagatatgcggtgttacttctgaggcctctgttctgttccattggtctagatatctgttttggtaccagtacctcgctgttttggttactgtagctttgtagtatagcttgaagtcaggtagcgtgatgcctccaactttcttctttttgcttagaattgtcttgactatgcgggctcttttttgttccacatgaaatttaaagtagatttttctaattctgtgaagaaagtcagtggtagcttgatggggataacattgaatctataaattactttgggcagtatggccattttcacaatattgatttttcctatccatgagcatggaatgtttttccatttatttgtgtcctctcttatttccttgagcagtgatttttagttctccttgaagaggtccttcacatcccttgtaagttgtatttctagatattttattctctttgttgcaattgtgaatgggagttcactcatgatttggctctcggtttgtctgttattggtgtatgggaatgcttgtgatttttgcacattgattttgtatcctgagactttgctgaagttgcttatcagcttaaggagattttgggctgagatgatggggttttctaaatatacagtcatgtcatctgcaaacagagacaatttgacttcctcttttcctatttgaataccccttatttctttctcttgcctgatcgccctggccagaacttccaatactatgttgaataagagtggtgagatagggcattcttgtcttgtgctggttttcaaaggaaatgcttccagtttttgcccattcagtatgatattggctgggggcttgtcataaatagttcttattattttgagatacattccatcaatacctagtttattgagagcttttagcatgaatgggtgttgaattttgtcgaagaccttttctgcatctattgagataatcacgtggtttttgtcattggttctgtttgtgtgatggattacgtttattgacttgcgtatgttgaaccagctttgatcccaggtatgaagccgacttgatcgtggtggataagctttttgaaaggaaaaaacaaagaggaatatctttatgacctcagactaagaaaaactttattacatatgacacaagaagcactaactatacaggaaaaaactgatacattttagtatactataattaagaatgttcatcagaagacaactttaagagcatgaaaaagcaagtgcttatattcagagtaatgaactctacaaatcaattagaaaaatgtcagaacaaccacttgtaaaatagcacaaaatttgaataggcactttacaaaagtggaaatccaaatggccataaacatatgaaagtattcttaacctttttttaaatcaaagagttgcaaattaaaatcacactgagattttattacatgttcatcatagaagggaaattttttaaagtgtcacaataccaagtattgggaatgacatggagcaacagaaactcacacactgctggtgggagtgtaaatttggacaacctctttggaaagcaaggggtattatctagtaaaggtgtaagcatacatatgctgtattcttctattacacccttaggtacctatgtttaacagaaatatgtacttgtggacaccagattacagctacaagaaagtttatgaacatttgcccataaaaaccccaaaccggaaaccactcaaatgtccataaactttgagtacattaactatttctgttatattctaaaatgagaaaacttacagcaataaaaattaataaactttagtgctgcacaacaataaggatgagtcttaagaaagtaatattgaacaaaaaaagccaaatgcaaaggattacataaacaaggttcatttatataaagtttgaaatcaagcaaaactaaactattttgtttaggaatgcatacttatgaagtaaaaagcatcaataaagtaaggcaagaaaaagtaccaaaaattaggagaatagtggcctccagggcagaagagggaggatgtaattgggaaggagctggtgaagtgctggtcacgttccattttatggcatgggtagttgtcacacaagctgctatggagtgaattttgtcccctcaaaattcaaatgttgaaacaaaccccccatgttgctatgttggagattgggcctctaaggaggtgattgggttaaatgaagtcacaagagtagagcccttaagtggtagaactggtgtccttataagagaaagagacagctttctcccctttgtgtgagaacacaaggacaaggtagacatctataagctagaaagagagtctttcccagacccaactatgctgacatcccaatctcaggcttcaacctccagatttgtgagaaaataaatttctgttgcataagccacccagtctatggtattttgttaaggcaacaaaggctgactaatacacaaacatttgttttaaaataattaatttatgttttatgtacatttttattatgcatgttacatatcataataaaaacccaataattttttaaaataaatgaccattgcaaaaaatgcagaacactgaaaatataaatcagaagatggttactaagtagagaaatcacaaaatcatgaaattatatttaatattgttgagatcatatagcatgtaaaatgtctatgcttcttttggagttttaatgtaaaacatttttttgcaaaatgagttatttgggagttatttggagattgtggttaaatatggaagatagaatgcatatgttttaccccaccctctcaaaatgccaatagaatgacagcacgggggaaagaacagtataaatatacaagaacaaagagaaagagaatggaaaacacagaggacaaatgatgtcaaaacacttggaagaccaaaagtgggtggagaagtggtaaatcacttagcagatcagggtttgttaaaccacggtgcctccagagggggataaaaatgagaataaaggcattttaccgcccccgctgcccaacaagccccagaggccctgcaagtgttgacatgatacaaatagcaagaaatggaagcagaaagaggaaagaacatgtgagcagagtatgttcacttactgctgcttctataataacaagaagttaaagagtattatttaaagttgacaaataaagaaatggacaaaataattacacttgacagtacaaaggtaagcacaaaaagatattattaaatacagtcagataatggataaaacagagaggaaaggaatcaccaaatggaaatgagagattttgattaaagaaatagtacactaaggacaatgtattacacggttttaattataattataaatttataataagtttttacttataaagacaaccactaggataaagatacaaactctttagtaatctatatatttgtaacaaataatatgacaaactctaaatactggaagaattgtacatcaaaaaataaaaagcaaataagagatgccaaataatgaaaaggtacaaaagtaattggggtttcagaccataaatattaaatcattataactaggctcaaacacatctttattaatcaaagtaggaaccattacaatcaacacatttttgccaatgagaaatgagtttgtttattcctgtagcataaaaatccatgctttgggattcaatgaactcttggaaggcattttctgcatcccgctggttatggaagtgtttcacctgcaaaaagttgttcagatgcttgaagaagtggtagttggttggtgagaggtcaggtgaatatggtggatgaggcaaaacttcatagcccaattcattcaacttttgaagtaactgttggttgtgtgacatgcagtcggttgttgtggagaagaattgggccctttctgttgaccaatgccagctgcaggccttgcagttttctgtgcatctcatcgatttgctgaacatatttctcagatgtaatggctttgctgggattcagaaagctgtagtagatcagaccggcagcagaccaccaagcagtgaccacgactttttttggtgcaagttgggttttgggaagtgctttggagcttcttctcagtccagccaccaagctggtcattgccagttgtcaagtaaaattcactttttatcgcacatcacaatctgattaagaaatagttcatttttgttgcatagaataagagacgacaacacttcaaaatgacgattttttaaacatttttccttagcttatgaggcacccatttatggagctgtttcacctttccaatttgcttcaactgccgaatgaccgtagaatggtcaacgatgagttcttcctcagcttcttgtgcagttgtaagaggatcaacttcgatgattgctctcaattggtcattgtcaacttccaatggccagccactactctcctcatcttcaaggttctcatctcctttgcaaaacttcttgaaccaccactgcactgtacctttgttagcaatccctgggccaaatgcgttgttgatgttgagttgtctctgctgctttacaacccattttgaactcaaataagaaaatcgctcgaatttgctttttgtataacataatttccatagtctaaaataaatataaaataaacagcaagtaataagtcattagcaaaaaaaaaagtgagaaatgcacattaaaatgatgtataacatggtcacatttatttaagaatgtattccaatatcaaacggcaaatttcaacaatgcaaaaaccacaattacttttgtaccaacctaatattttaaaaactaaatacgtcatatgaaataatataaacaagctaagactaagcaaatctgtcatgtcactaaatataaatggattttactcacctatttttaaaaatgcctattacattacaaagcaatacccaactctatgttgaataaaaaaaatactcctcacggtgatacagaaaggctaaaattatagaattcaaaagacataagcaaaggcaaacaaagaaagcaggatccatgattttaatatcagagaaagtggaatctcggtcaaaaagcatgaaataggacaaaaattgcacagacatattaatattaaagacgatagtaatctatatctttgcaacaaataagatggcaacaatatttataaatcagaaattattagagtaggaggataaataaaaacattgtaggaatagaaattttcaattaattttagccaataacagatcaaatgtattaaaaagtatgtaaaattatagatgacctagtaatataattaatataatgtatctgattaatatatagcaaactaccttccctaacaatagaaaatgcacctccttttcaaaaaaccaaacatatcaaaccaaatattaagccatgacaaaaacctcaataagctccagaaagtggaaataatatagaaaacattctctgatcataatgaaatagagttaaaaaaaataaccaaatttaatgaaatgagaggactttccacttgataatttttaaaaatctctcttaaagaattcttggacaaaagacaaactataaactaaaattatataatttcgagggaaggaaagataaaaaacagtttaatcagaacctagagagtgcagttaaagacatacatattcagggaataagtcacagcatggaagcatagaatatttatatcagtaaaagctgaaaagaaattatttaaagacctaacaaaactagaaaaaggataacaaatgaaagaaagaagttaataattataaaaagcaataaattacaaaatagaaaaacagtagatctaataaatccaaatgctgttgtaaaaatatgcacaagacctttatactaaaaaataatacagcattattgagagaaattttaaagtacctaaatgaattaaaggatgtctcatgtgactggattagaagattcataattgttagaatgtcagtgctgcccaaattagtctataaattcaatgacatccccaaaaaaatcccagcagcagctgttttatagaaattagctgaacagatttcatttgcatggatgaagtgaagtttatttaactattttcctattgatagacattcacatttatcataattaacataatcctcatattttgccaccacatattaattttttggtgagtatccttacacatgtatctttgtacacataatatgagtaaaattaaggatgaatttctagaagtagaattgccaggtcaaaggggtgtacattttaatttttgagatattgccaaatcgtcttccaaagttggatcctttccattcccagtaattatcaaatccattctttaggagattttgtattaactgaactgttgacataattccctttatatgcacactatgaaaagtataacatatacaaatctacctatatggtcacaatcctgggaatttatgtgacaggtattggatgatgttcagcatccttggcctcgtggaaataatcagactagattttctttttgaaatgcaaattgataatagccattagttgtttcctatgttgctgagaacccagaggaagataataaatgtccttgggatagactggggctccaaagatcatgctgtatacttttgaaaaagcattaaattgtagccagtgaggaatcagaaaccaatcttattgccatgttcttaacacaatctttttccttatcttccctcccttccattattccttgctgaaacattagctttgcacaattacctgctgataatggtagctctatgtctttctgcgtgcctgcctatctgtctgcttgtggaaagataaagatagatattccattttctaatcccctcttttgcttgggaagaaactagaggttcttcctcagattgggcaccagaaggtaaagagagcagggggtcaaaaattgttaagaagggcaagactagaactttcctactctccccatgccctggtttcagagaatcattgaaggggctctttgatgaccctaggacactcacctctaagcataacaatattctggaaaacctttgacaaattatagcaatttggttgtagagaagataaatgttttctcacctggcaaagaacatgtgaaatgaagctgaatctactgcaaacggggaagtgggtgtttaacactgcatgcataaagtattgatttgtatcttttcaaatttatggaactgttatcattttatatgtgtgctttatctgatgttttaaaattatgtttttgggatttgcccaaatggatacatgtagacctaattcattcattttttattgccatatagtattccataaagatattatcctgtgttttctcctcaaagttacagttttcctttctacatttaggtatttcaatctcctagaatttatttttgtatgtgtgtggtatgagataggcttccaatatttttccatatggattattccaacatttttttcaatacatcatttcccaagtggttcctaccactgcttctgccatgcaccagattcccatgtctactgaatctgtttctcccagtaatctcattgtcacatcctgagtcaacaccacgtggatttaaatgctctatagtaagatttgacctggtcgattcacatgcccctccttatttgtcttcttgaaaattattttggttcttgtttctttacttttccatatcagtttaagggtcacattttccagctcttttcttacaactctgtggaaactttgtttggtaatgcactgaattgatttatcaccacaggaagaatcgccacatttacaatacgaagccttcccacacatcagtatggcagatctcttaatttatacaggtcttctttaatatttttctacattttataatgtctttttcctaggtacattgcaattttggttgccctattgaatacttattattgctaaactgtcttaatattattaatttctatatagtgattttgcatccagcaaccctgctgagctccttaaagttaaatttttctgtagattcccttggacttcctatttagacagttatattatctgcaaataatgacaaacttgtttcttcctttatgattcttataccacttttttatttttcctgtcttattgaattggccgggaccttcaacaagatggtaattcaaagctatgacagtgagcatatttattttgctcttgattttaaagtgtgtgcttctaatgtttcactattatgatgtttatgagagtctcataattactttttatatcaattttttccatttcttgtttgttgagactttcatcatgaatgggtgttggcttctatcagtatttttatatttattgaggttatcatatagtctttcatctgttagtatagtaaatctgtaaactaacaggtttgttagtctatttttaatggttccagctgatcattttgctggattcaattaggtgtatttcattttatctattttgctaaatgaggctggcctgtaatcttctttcataaactgtccctttgggatgttccaactctctcctcaattgtccctgggaactccaacttattcttactttgtttagcagagcaattcatctctctccatctcctacaatgtttctcaacaagtgatctaaggatctctatgcacatataattttaaaatctaacatgtaagattaattattatattcatagaatttctaactttttatgttttcaaaaacagtgtatgtgcttcaaaaactgatttcattcataatggttaacatggagttaatcataggcagtttatcttgactaatgtattttattgtcacctgacagttatttacacttgtcagacttgcatttgccattattactgtcgctttgcataatatcacaattcaaaaaaaagagtcatcacttcgaaagtggttttctgaagcataacaataatgataaaaatagaaatataaatcctacaatgtgaaataaggtcacaatgtaagtaatgaatggcctccattgtaaaaatacaaagcatgaatctgtttgtcatgagacaagtggataatggatgtggataatctcccaaaaccagacaaaaatatataagaaaatgggagccatgacaatgaataatgataattgaattttattggaccaatgatccttttgtcctagtacccaatttattatctgctaacgtttttgtcaagtaatgatataaagctatcaaaacttccatattattttccaataaagtttatcaaccccacttttaaaccaattgaatatctctactacaagcacaaaataaggctttcccagtataaaattgtgaaaattttatgttaaaggttgagaagacaacaaaactatagagtcatcattcatcctcatatcaaaaataagcacaattgcactcctgctggtaagatacaaaaccagtttccaaatcaattacaaatattgtggttggagaagaaacaagaaaaacaattggtataattccttaattagaagtattgcattccttataatgtgactggcatttaaagtcaatgactgttaggtatacgagcagacattttattttatagttgaacaaaactatgaataagtaagttgtcagcatatcttcactatatatatgggaaagactcagtgactttttgttctatttatcatgaagctaattttaaaagaagagctctctggtttaattaaaaattagtttgaacctatgaaacagactttaaaaggtatgttggcttatgcactaatgtttgtagcagcgttattcacaatagccaaatatgtccatcaacagatgaatggataaaaaatgtagtatatatgtaaacaattgaatatcattcagttttaaaaatgaatgagattctgatacatgccacaacattgacaaagcattgtgctaagtaaaataactcaaacgcaaaagaacaaatgttgcatgattccacctttagtaggtacctagaacaggcaaattcatggagacagaaagtagaatggaagttgccagagagggggaatggggagttattatttaatgggtacatttctgttcgggattataaaaaagtttggaaacagatagtggtgatagttccacaatactgaatgtacttaatgccactaaattgtgtacttaaaaatggtgaaagtggtaaattttatgttatgtatattatgcatattttaccaaaacttttttttaaaagaggaaaggtgttaaattgccattgaagaaactccagccacatggtcagcaaggaaaggtatcactatccagatagaagatgctgctcccagatcccaatgctagtgcataccttattcacggaacgcagctgggggtctgtaatatgcctccagattctgatttgctgttgaggtacacagtggaaattgtgaatacaaactgattgtggtcacttagtgtacatctctttggcctactgggctgaaatgaaaagtgagtaagagaggctgctctcccacactgaattgctttggctggcaaatgggaagggcttacacagagttttaaaaataaggaatgaaatgttttaaattaccatttttatgaatacaagttgggtatctcagtgatccattcagaatttgaatattatgaatctttgttttcagagcctgaatatcgggatttgtaacaatcagacatcagtggtgcaagtggctcaacggctgagaacttgactttttcccaatacccaatgattttcttcattcaccagaaaaagcacttaggaaataacacattgggcttattaaaaattacatctgaatgctgcaacccaacatcaagaaataccttgcagagccaaataccaccaaagagaggatgcaactccattagctgctgttgagctggggcacttgccttctggtgaagcactgaaaatagtctttagagagcactctctccataatttctgggtctgtgtttgatttgacaaaccagaaatatccatcaaagcttcccaacaacctataattctgagttaagattttctaatttagaaaacataaagagtgtgggggggaaaccaacaagatatggaagctgacagctcaagcagctatgcaaccagatatagattcctaaatgatttcaaacacgatttctcctctcacagatgtgaaaaaaaattattcactttttaacttgacttttacttttatttaagacatatatgttcataatttaaaaggtcacagagttttataaagattctgacaaaaaaaacagcaatttcatttttctcatctcttctttccagaggccaccacttttagctttttttacctgtgtcttctgatacctccctatctccaataatatactcataatactaatttttaatttttcaatttctgatgttatttattggcttcctattatgagaaaaaacttaaggccacatccacaaactcatttcctctcaccctcatcttcctgttacagttatattgtaatcttcagttagatcatcagataatatatccattgtatgactacatatataattacattacattgctaagtaaacactgtttacagctgtgtcatgcagtgtactttgactatatttcctttttgcacaatgtttttgctttccttggagttaataaggattttatttttttgtttgctcagttttctatttatccctaatttgttcccaaactcttctccagatgtttaattgttgcttcaatttatttgcacacatcaggtgcatgtgtatcatttttttcctatgggaatcacagctagagtacttcatcttctgcctcattctgacctagatgttttctaggcctgatgcacagctgttttctagagattttttcttcttcattctttttttggattccttttgcctcttccctggatcgcatatatgtttcttgtttgaatggagcatatcctctagtaacatttttttttaagacaaagtctctctatgctgcccaggctgttggcctcaaactcctgggttcaagtgatcctcctgcctcaacctcccaagtagttaggactacaggtacataccaccatgcccagcttctagtaactttattagaagggtaactaagaagtacatttcccaagacttcatatattctaccttctttgacagtttggctagggaaagacttctgtattagaaattatttccctcttaattttgaaggccttgctcattgtcttctaatttctttctagacctcctattagtcaaacaatatacctcctagtctgattctctaattttcaaactttttatcacttcctatccatttctgcttttttgttccacttcctgtgagatttccaaaactttatttacaagtccgcctattagtgttttacttttgctatcatatttttgttttcaaaattccattttgtctttgaaggtactttttacatccttctgctcttgttctatacgtggagcctcttctcacctcttaactctctaaaaatattagtacaggtttttttttttttgtttttgtttttgttgttgttgttgttgctgttgttgttgttgttttggagacgaagtcttgctctgtcacccagactggagtgcagtgacgcgatctaggctcactgcaagctccgcctcccgggttcacgccattctcccgcctcagcctccggagtagctggaactacaggtgcccgccaaggcgcccggctaattttttgtatttttagtagagacggggtttcaccgcgttagccaggatggtctcgatctcctgacctcgtaatctgcccgcctcggcctcccaaagtgctgcgattacaggcgtgagccacagcgcctggccaatacagttttatttctctaactcttcttctgccctctttattgtctctttttcttttcttttcttttcttttttttttttttttcagttgtttggttgctttggtttctggtgttagaagcatccttcaaattcctgatgctccttggctggctgttcatgttaaaagtgcagcatcttcatgggctctaaaccagattatcttctggaaacttaacgaggagcagaagtgaatagggaggggagttgtttgcctttcagtaggtaaacttttctttatatgcatttttcagtatgcaactgtttccctcttcttcaactcttaagaaaatgagcatccaatccatttctggagcagaaacagtttctcattgaatggatggcataaagcagcatctagaaagctcaactggttcctgtaaaaaactttcaagcaattctttcagccctacttatcaccctcccccaaaccttgctttcagagatacttagcatctctaagttccaagcagttctggggctctgcagcatagcttggcttgcttctgggtattccctgcttcagccagttttcagctttcttaggtctgctctgtcagttaccactcatcagtctgcactccagtttctaaaaactgggagtttttagatgagcctccagcttcttgcaggatagggaggccctggcagacataaacaggagaatccttgctcttcacccgctactgccctctgcctaaccccagaacagcagaagctgctggctgtcccagccacacacatccctccccactccatctatttgtgtggcccttctttttccctcagtctgtgtcttgtttcctctccttaccttcttccccctcatcaccttggtgatattctttgcatgttttttcttggagcagtcagagcaggtcatccctccctcctggaagaaggaaccccctgagtacactccatggcacagttgacactccttttctaccctccttcccagatatgtcttcactgtcatttacacctttgaagccttgataaagatactggcaagaggattttgtctaaatgagttcacgtacctgagagatccttggaactggctggattttagcgtcattaccctggcgtgagtatatctctatgcagatctgcatgtgtgataggagaggggacaaaatggtgggtaggagacagggctaacatgcaggtcccacttggacagagtgtggagactcacaccatgaacgtttgctccaagaaccactgcaggaatataccaggagaactgaaagaattcatagatccttttaaataagtggcacactgctggaaattctgcaagacaggtgaaaaactgtgagctcccaaagtgtgagggggggaaacctgcctccaaacatacatcccaactgggtaatctgaaaatccagatcacaggagaagaatttacccttacctggaatgtaaataaatttaggaagccacacaaaatataaaagtagaaacagcaaagggaagtgccttgtaggcactcccagtctccagcttgagaccagggaatccatccctgactatgtctcacaggcacccttggggaaggcagccagtggaatcagggaggggtcacaggatgaaagaagtttcaactaaaattagtaataatttcaactgggcacaaattttcttgagcagaatccagggggcaaatgggaactgcaagcagacagtgagggatgcggtccaaaagtcatgctttctttctcagtggggaagctcacagcctggggcaaggtctgagtagggcactgcaggagcaagaccagcctcaccaactacatgagagctaggtgaggcctctcactagcagctatcccccacttccctggagaactctatggcacagcagaggcagccaaaattccctctggaacacaaccccactggcctgagaaccaacccccatccaccacagtggccacagcaatccctacccaagaagggtctgagtctagactcacctacccctgcccccacctgatggtatttccctacctgccttggtagctgaacacaaaacccagaaactctcggaagctttatggccctgctcatcacctaagaaactaaaatatttaccctggccaacttagggtgagcttagatcccccttctactaatgcactagtgctctcttgaaagcatcacctaccggctggaggtcaaacagctcaggccattaaagcaactcatgacagaataactttgatcccaggaaaaagaaaacaacaaccagttgcactgcctgcaacatcctggctaaccagacgtcctgagtctgtccatatgacaacttcactgctaacataactagcattcaagaaagccagcacactaaatctatctacagcctaggactctcacagactctacttcattcctctgccaccttcaccagaacagatgctgatatccatggctgggagacttcaagatcaatcacatcacaggactcttgcaggcatttcccagtactaccccagagcctggtagcccctctgtgtggctaggcccagaagaacaataacgatcactgcagtccagctctcaggaagccccatccccaggggattggggagagcaccacatcaagagatcacccatgaaacaaaagaatctgcacaacagccattcagttccagatcttttctctgaaatagtctactcaaatgagaaggaaccagaaaagcaattctggtaatatgacaaaagagggttcaataacacccctcaaaagatcaaactagctccccaacaatggatccaaactaagaagaaatctctgaattgccagataaagaattcagggctgggcacagtagctcacgcctgtaatctcagcactttgggaggccaaggtgggcagatcacctgaggtcagaagttcaagaccagcctgaagccaacatggagaaaccccgtctctactaaaaaatacaaaattagctagatgtggtggtgcatgcctgtaatcccagctactcaggagactgaggcaggagaattgcttgaacctgggaggcagaggttgcggtgagctgagatcgcgccattgcactccagcctgggcaacaagagtgaaaatccatctcaaaaaaaaaaaaaaaagaattcagaaggctgattattaagtgattcaaggagacaccagagaaagataaaaaccaacttaaagaaatttttaaaacaacaagatatggatggaaaattctccagagaaatagatataaagaaaaaacaatcacaacttctggaaatggaagactcacttagagaaatacaaaatgcagtggaaagtttcaacaatagactagaacaagtagaagaaagaacttcagagctcgaagacaaagcttttaatagacccaaactaagacacacaaaaagaaagaatttttaaaaaaatgacaaatcggccaataaatttggaatcatgtgaaacaaccaaacctaagaataatgggtgttcccaaggaagaatagaaatctaaaagtttggaaaacttatttgagggaataattgaggaaaacttccctggccttgttagaaatatagatatccaaatacaagaagctcaaagaatacctctgaaatgtgtcacaaaaaagatcatcacctaggcaaatagacatcaggttatctaaagtcaagacaaagaaaagaatcttaagagctgtgagacaaaagcctcagataacctataaaggaaaggttatctgatttacataagattaacagcagatttctcaactgaaaccttgcaagccagaagggattagggtcccatctttagcctcctgaaacaaaataattgccagccaagaatattgtatgaagagaaactaagcttcataagtgaagacaagataaagtttttttcagacaaacaaatggtgagagaattttccactaccaagccagcactacaagaaatgctaaaaggaattctaaatcttgaaataaaaccttaaaatacaccaaaatagaacctccttaaagcataaatatcaaaggacctataaaacaataacacaataaaaaaaggaattaaggcaataactagcataatgaatagaagagtacctcacatctcaatactgatgttgagtgtaaatgccctaaatgatccacttaaaatatacagaagggcagaaaggaaaaaaaaaatccaccaaccaagtatctactgtcttcaagagactcacctaacacataaggagccacataaacttaaggtaaagagatgggaaaagatattccatgcaaatggaaaccaaaagcaagcaggagtagctattcttatatcagagaaaacagaccttaaagcaacaacagttaaaaaaagacaaagagggacatatataatgataaaataattggtctaatggaaaaatatcataatcctaaatacatatgcacctaacactggagctcccaaatttataaaacaattactactagacctaagaaatgaaatagacagcaatataataatagtgggggatcaatattccactgacagcactagacaggtcatcaagacagaaagtcaacaaagaaacaatgaacttaaactgtaacctagaacaaatggacttaacagatatttaaaaaacattctaccaaacaactgcagaatatacattcttttcatcagcacatggaatattctctaagatagaccacgtgatagataacataacaaatctcaataaatttaagaaaatagaaattatgtcaggtatcctctcagagcacagtcgaataaacctcggagttaactccaaaagaaaccctcaaaactatacaaatacatgaaaactaaacaatctgctcttgaatgatctttgggtcaacaatgaaatcaagatggaagtttaaaaattttttgaactgaatgataatagtcacacaacttatcaaaacctctgggatacagctaaagcagtgctaagaggaaagctcatagcattaaatacctacatcaaaaagtatgaaagaggacaaatagataatctaaggtcacacctcaaggaattagagaaacaagaacaaaacagacccaaaccaagcagaagaaaaggaataacaaagatcagggcagtactaaatgaaattcaaataaaaataataataatacaaaagataagtgaaacaaaaagcgggttctttaaaaagatatagaaaattgattgaccattggcaagattaaccaagaaaagaagagagaagatccaaataagctcaattagaaataaaatgggagatattacaactgataccacagaaatacaaaaaaaaaatcattcaaggctactatgaacacctttatttgcacaaactagaaaatttagaggagatgaataaattcctggaaatatacaactgtcttagattaaatcagaaagtaatagaaactctaaacagaccaataacaagtagcgagattgaaacagtaattcaaaaattgccaaggaaaaaaagtccaggagcagactggattcacagctgaattctatcagacattcaaagaagaattggtaccaattttattgaaactattccaaaagatgcagaaagagggaatcctcctaaatcattttatgaagccagtatcaccctaataccaaaaccagaaaaggacttttaaaaaagaactacagacaatatccctgatgaacatagatgcaaaaatcctcaacaaaatgctagctaattgaatccaacacatatccaaaagataacacaccatgatcaagggggtttcataccagggaggtagggatgatttaacatacacaagtcaataaatgctgcacgtcacataaacagaattaaaaacaaaaatcatatgatcatctcaataggtgcaggaaaagcatttgacaaaatccagcatcccattatgattaaaaccctcaaccaaattggcatagaagggacatactccaaggtaataaaagccatctatgacaaatccacagccaacattataccaaacagggaaaagttgaaagcattccccctgagaactgaaacaagacaaggatgcccactttcaccatttctatccaacatagtactggaagtcctagccagagcaatcagacaagagaaataaataaagggaatccaaatcagtaaaggggaagtcaaactgttgctgttcaccaatgatatgatcgtatgcctaggaaaccctaaagactcatccaaaaagctcctagatctaataaatgaattcagtaaagtttcaggatacaaaaacaatgtatacaaatcagcagcactactgtacaccaccagaaaccaagctgaggaacaaatcaagaactcaatcccttttacaacagctgcaaaaaaaaaacaaaaataaaaacaaaaaaatcttaggaatatacctaaccaaaaaggtgaaagatttctacaaggaaaactacaaaacactgctaaaataaatcacagatgacacaaacaaatgggaacacatcccatgctcatggatggataaaatcaatattgtgaaaatgaccttactgccaaaagcaatatacagattcaatacaatttccattgaagtaccacatcattcttcacagaaatagaaataacaaccctaaaattcatagggaaccaaaaaggaatccacatagccaaagcaagactaagcaagaataacaaatctggaggcatcaccttagctgatttcaaactatactacaaggctatagtatagcctgtaccaaaacagcatgatactggtataaaaataagcacatagaccaatggaaaagaatagagaactcagaaataaagccaaatacttacaagcaactgatctttgaaaaagcaaacaaaaacgtaagtggggaaaggacaccctattcaacaaatggtgctgggataattagcaagccacatgtggaagaaagaaactgaatcttcatctctcaccttatacaaaaatcaattcaagatggataaaaggcttaaatctaagacctgaaattataaaaaattctagaagataacattggaaaaactcttctagacattggcttaggcaaaacgttcctgaccaaggacccaaagcaaatccaacaaaaacaaaaataaatagatgggatctaattaaactaaaaagctgttgcacagcaagagaaataatcatccaagtaaacagacaacccataggatgagagaaaaatctttgttatctatgcttccagcaaaagactaatatccagcatctataagaaacacaaataaatcagcaagaaaacaaacaaataatcccatccaaaagtgggcaaaggacaagaatacgcaattctcaaaagaagatatataaatggccaatgaacaggaaaaaaaaatgctcaacatcattaattatcagggaaatgcaaattaaaaccacaatgagataccaccttactcctgcaagaatggccataaccaaaaaataatagatgttggcatggatgtaatgaaaaggaaacaattttacactgctggtgggaatgtaaactagtacaaccactaaggaaaacgttatggagattccttaaagaactaaaagtagaactaccatttggtccagcaatcccactactgggtatctacccagaggaaaataagccattattaaaaagacacttgcatatgcatgcttatagcagcacagtttacaactgcaaaaatatggaaccagcctaaatgcccatcaaccaacaagtgcataaagaaaatatggtgtatgcataccatggaatactactcagttgtaaaaaggaatgaaataatggcattggcagcaagctggatggagttggagactattattctaaatgaagtaactcaggaatagaaagtcaagcatcatgtgttcttaattacaagcaggagctaagctgtgaggatgcaaaggcataacaatgacataatggactttggggacttgggaggaaaggtgagacgaaggtaagggataagagactacacactgggtacagtgtacactgctcgggtgatggtgcaccaaaatctcagaaatcagcgttaaagaatttttctgtgcaacccaacaccacctgtttcccaaaactattgaaatacaaataaagaacttattcatgtaaccaaaaaccacctgttccctcaaaactattgaaataaaataaaataaaaagatttgcatgggtgtccatgtggggcttatgggtgtatccaggctcacactctgaagaaggttcttcatctcagttcagcttcctcatttggaattgtatggcctggggttcttgccacagagtaccgcttcgggggttgctttccaagattagtcccatgcccatgaggagatgtcagagacctcaaatctgagataacagttagcctgtcacagtggatcagaaaaggcccagccttgtacccccctgacatggcggtctccttctgagaaatcagtgtctgaggagactggttggtcaaactcctgtgtttgaagatccgtccacatgcagtgttgcctagatcacaatgcatcttctcaaagggtccactctgaaagatgttgcaataatgaaatcagtgtcagtgtcagtctatagatggcagtgtcactagattctaagtgtccattctgcatcctttctaggctaatgataccccaggttatccttatttatgctgcatgcatccccaggacccttgcttgcagagatgctgactaacttctggtcctacagatatgttggcacagcaatagatctccgtgggatctcaggcctgcggacattcagagttcttagagcattaaaaacagtttctgtgatcccaggtgagcatttattcacagagcatatgttggttttcacagcctaactcccttctctaattttcacaagaaccctgtaaggttccagggcaaagactattgtccccacttacaagacaaaggaactgaggcctggagtataggaaacataaacccaaggcctcttcactagtaagagacagtgtgacctggaagcctattgtcccaactcctaggccagtgctcttcccacataccacatggcctcacaatcaatacgtaacaggaggggcatgtcttcactttctgttctggttgtgggattcaggcaagacccctcagttgaatttttatttataccttaaactaaaggattaaacttggaaatggggaggaagggagaaagcagtcccagtatcttcactgtttccgtaggtctaaaatcctgtctttagacacccagaggaaaaaagaattaggcaattcttgattactgagaattcagaaacaaaagtagtccatcaaagctcattgtgtggggcctctaagatctccactgtcaccagtagcccagcgactactcttcagcccccatgaggttgatggtgaggatggggaggccagagacaaggcaaactttctgaaatgggacttgatgcttcccctctgtggcctgataggttctctcctctcaccccaagaattcgttctcttatctgtaaacagaaacacccattctagagtggaagtcttttctaccatttcttgtctggctctgcagggaaagataggaaactctctgccaattcccactggacacacctcttgaagagagccctggtcctgccccttcatatctctctcacttactctcaactgggaagaccctgagtcttatttgcaagacctggtctgtccatactgtctcttctgcctcatctctcacctctcctcacatctcaccatgctctggaatccacctacggttctgcaaatactccacaccattgctcacctcccagccttctactgtgctgccccttcttctgggatatccttcctcctctctttactcaactcacactcattcctcagggctctgccaaggttttacctcctccctggttttcccaccttcctcacactccacccaccccattcccacctctggaacttcagttaagggctgctcccctgtgtgcccatctgctcagtaatgctacagactttcccctcaattgtcagacaacggcactcgacatgctgctgccttagccatcactcagctcccagtccagggactgacacatgtagtgctcagtggattatttgctgaccaaaatgactaaccaaaaataaatcctagattgcttccctggtcagagctctttctgctacctgcgaagctgctctcccaaagaagttgattttacttaccagagcaacaaatcatccctccttaaacaagcaggtgtatccttctttgctgccagctgtgcttggcacaagttctatttatgccccagtgactgtctcagtgtttcttatagtctctttctattgctaaactcacctctctgtttctctgtgtctctttctttttctttctcttggtctatttttgtttcactctatctctcttgcatctctctctctctctctttctctctctctctctctctctctctctcacacacacacacacacacacactcacacacagtgaggttcatgtgtcccaagtctcaagctgcctcccagatgcatgcagaaagacagatgccaaattactggggtgaagttagtagcttcatgcctagcacagtgcctggaaaaagtaggtactcagcataaattatttaaattgaattgctagtgtcaggaattttattagcctcaagatgataaaaaatgcattgcctgggtctcagttgcatcgtctttataatgagaatagcccctgactctctgcctgcctctcagagtaaatgcaagcttcggatgagaaaggtcttggaactgccctggagtgtgtacatacttcactcctgtatgtagagatgaaggaggatggctaagatgaagaagtgtgctccgtgtgtgctacctcatccatgtggtcataccactgtcatcttcccgcaggcctgaaggtcattgtgggggccctgattcactcagtgaagaaactggctgatgtgaccatcctcaccatcttctgcctaagtgtttttgccttggtggggctgcaactcttcaagggcaacctcaaaaataaatgtgtcaagaatgacatggctgtcaatgagacaaccaactactcatctcacagaaaacgtgagtggagtctcttccatagggaccaaggtctggttggacccttggtatcatatagggacaggggatatggagcccctgtgtgtgtgtatagacatatattttgactcccctttcctgccaaaatggttctcttgagttgtgttttacttttgggtattctatttcctgttgctcagcatccctcttgcaaggaaatgagccataaatctagaggcaagtcattctacctctgctgggggagattgagagccgaagtcactgcttagctcttctcttttcagatgtgactttacaacttccatgtggcccagcatgcccactgagtacatgtagccaaaggagctcactttggaagacttgggaatattgcattcaccacacaaggcttgggttggagggttcagaaccatctgtgaggctttcttttcttcctttcttcagcagatatctacataaataagcgaggcacttctgaccccttactgtgtggcaatggatctgactcagggtgagttcccaacttatgacaaagcacgagtgcccaacaattccttctccatcttgtccttggcatattatgggcacagatggggttgcaggtcctgggaaagatgtataaataaataaatcatggcctttgccaacccagagctcatggggagggaatgtatgagttagctttcgctgtgtaacaaatgaccccaaaattttgtgaattaaaacaacaatgtatttaattcatgattctgtgcatcagcattttggactgggatcagatgggcattgggtgacattgactaggctcattcatgcatatgcagacagcatattaacttggagatggctggtctaggacgtcctgtctctgctcatgtggcctctcacccccaaacaggttagcctgggcctgttctcatggcagtgttcccagaaaaacagtggaagtttgcaaggcttcttcaggcctaggcttagaaccaacacaatgtaccttttgtacattctgatacattcttgactaaagcaagttgcagtccagtagagatccaagagacagagaaatagacttcatcactcaatggaaagagctgaaaagtcacattggaaagggtgtggatacatagagacaagaattatagccattttaataaataatctaccccaggaaggaaccaatacttatttgtgtcaaatgctctacacttaatcatcacagctaactccattctatagccacattaccctcacaagtagaggaaaaaacacatgtatcagactttgcaatttcgaattcttacagaggccagattcataacaacaaatgagtggagtgggccaggagggaacctaggagctgagagttcatgcctcctctaaaggggacagccccactgctcggtccagcttttggttgccatgtggaaatgtgggttcactgtttccagctcttccaacttttaaaatagagataggaaatttagatttttatataaaatctcccaaccgtaaacattggctacctattccaaaaaatgtctacatattgttgggccaaacaaaatatttctgtgggccaaatccagcctataagctgctagtttgcaatttctcattcatagacataaagatgctaccctgtggaaaacaagttctttactagaggcttcataggctgggcaaacacagtgaggtggcggtgtgaggcaagagagaaagtagggaaggcttcctggaggtggtgtttgaggtgagctttcaagggcaggtaggatgtctccaggctgggtgaatacgagatagtttcagcgaagaccattccaggtggcagaacagaatgtgagacaaagctaagggatgaggacccctcagctctgcctgctgctttggccactggaggaaggcatgagcagaaagactttaggcaaaagatcaaaaaggcccatctcacccacctccatggctgagagcttggaaaagcagagctcacaacacccccagtgcctgagaggctgacggctccatgttgcccaggtcgacctgtgtggagcctgcatgaggctccaccttcatcagctcactaggaaaactatctcagttggagctgaggactggaaacaagcaggagcatttggtcaacatcaggttccttggactgttctttcacaaatgcacttggcatttggttctttggctcatgagagggttgttctgacatcagttttcatttgcctttgacttaaatgtaaaccaagagcccctcagcatccttctgtctagataatggcatttctcaaggcaatggctccagagcagctcaagtcctttttgtggtaaagttgttgggtccatctacacacctctacagctcagctccctgagaggccaggcctgctattgggcaggtgccagccaggcagtgggggagtggaccaggctgggatggcagagagaggccagctcaggataacggacagagtgaaccctgccggggcatgccgtgaaagctaaacctgggtcctctgtggggctgcagagaagccagagtcctgaggaaaggcccacattggccaatggcactgtgggaggaaggtcaggggtctcaaggcagaaaatggataccagaaaatagttgataattttcagtgttcttccacatatattattccagtttatcctttcagcagcttccaaggttaaaaacaataggaattttcctttgcagtttatatacaatatttactatgcagaagtgcaagacactatacagtgatctcatttaatcctcagagcagtgaactgtttatatgcagtggctatggtggatttctacagaagacatagaaacaaggctgccctcagagttaattaagaaacctacaggaaatgggttgcctagccccttggaagagcaaaccaagagcctatctttaaatgtgggtctacaaagccagggaacttgcaatcttcaatcgaagtggagatagacttggaactgattagaattaagttgtcagagctctaatccatggtatgggttgttcacatggatgtctgggataaggagagccccagaggttggagttcatggagaaatcctgggagtaaaagaattccatgtattcacaaggaatgcaggtaaataaaacaggagaaaaagaaaaaaatttaaaaaaataattctggacttcaaacgaggcattgctgtttcattgatcaggccatctctgctagggtggatgagagcactttacgctccctgagctgacagatgcttcttgacatcgactcatcctcctattatgagagagaggaaggagttcagcattcccacctcaatactcaccaggcagtcatttttaatctggccttccttcataggccatcttcaggaggaggctaggctgactcaagtattgggctacttgacagttatatttctccttttaataaatatattgacacctgcgtagttttaggcaactgacttctttctgacccccagattccttatctgtaaagaaagaacattgagtgattaaattatagtgtttgtaaagcacttaaagggagagagaagaacacagaaagtgctcagtaagtggaaagtgttatttccactgttacatataattaatcagtgaacttggctaatgtgagacctcccttgatagacaactctgcagatgatgccaacaggctcaggttttaagtctgcgttattgctactgactctcatttccctggtatgaactggcaaagagcttatagtatcgtgtctgggcagtcagctgccttccccaggccactcccctgtgtatgaaattctgacgtgaaagtattagcgtccccgttttatggataacagaaaccaatacctaaacagaccaagtgtccaagatcatcctgctaataagaggaagactaggtcttgaactctgatctctgacataaaactctgtggttgtctcgcagccctgggctaccttgtctgcaataagcaggggatgaccttctctgttcttgctgcagccactgccctgatggttatatctgccttaaaacttctgacaacccggattttaactacaccagctttgattcctttgcttgggctttcctctcactgttccgcctcatgacacaggattcctgggaacgcctctaccagcaggtactgagctgcattcccccacgcagacttggttggaggctggtgggtcagctgcatggctgtgcttttcctggaggaggctgacttaaattcaggggtccatgtgctatgggtacaggtttctcttctttcccttgaacctgcagaccctgaggacttctgggaaaatctatatgatcttttttgtgctcgtaatcttcctgggatctttctacctggtcaacttgatcttggctgtagtcaccatggcgtatgaggagcagaaccaggcaaccactgatgaaattgaagcaaaggagaagaagttccaggaggccctcgagatgctccggaaggagcaggaggtttgtgaggagtggaagctttgtgaagaaggttgcagactgtccattcttggatactgttctggactagccacttcaattagggcaccgtttagggagctataggaggaatcatcttgcctcagggaccatattagatcaggttttctcaaagaagaagctaagtgaggattcttgtgcaagtgacctattgagggagtgctctcaggagaaagcgaatgaagcaaaacagaatggggcagagggtggaactaaacaaggagtgttctcagctagagaccagcttcagcttgatcccatggggaactctggggcatgacctgtaccacagttagtcctaccttgaggcaagggggccagctttttttttttaccctccccatacctatcccagaagcaggcagccaaaagagactttttttgtagaatgctgcaagtatgagccatcagctgctgccatgcaagcagctcgggatagctgtgctgacctggtgaaagggatctgggtggggcaccaacagagtaccccatgaatgagtgggggtgacccgaggtgtctgttcctgccatggcctaatcccaccaccaccctggtcctaacccttcagcttctctgtttcagatctctcacccctggcaccccatgtctgggggacacattcatgctaagtccaagcaaatactattggctacacctgctgttctctcttcgcaggtgctagcagcactagggattgacacaacctctctccactcccacaatggatcacctttaacctccaaaaatgccagtgagagaaggcatagaataaagccaagagtgtcagagggctccacagaagacaacaaatcaccccgctctgatccttacaaccagcgcaggatggtaagaggctcaggtttgtgctctaaagattacccaccattgcagctgccgtagacaatgagttggagtgggaagaggtgtgtggcagagaaagagctggaggcatagagcctaaaaggatccagacacccctccaaaatggtgtcttaaactaggaaagtgtaattatagatggggaaaaggggtgaattataaggacaccttagggaagtggatcaacaagattgggattgtggactgtggaaaaaggaaaggggagtccaatttgactcccaggtttcaggattgggcaatcaaatgggtggtgattccaagatgaggacactggaggaagaaccccggtttgtaggaaaggtgggaagcccatactgaacatgccaatcttaaggtgtctgcggacatcaaaggtcagcttccttctgaggctctggtctgcagttctagagtgcaaggttccctgtccgtggtgctgagatccttcatgcaccttttttttttctgatgcgtcgaggtggtttttatttttttacttagttttttttaattgacacttcacaattttatataattattgggtataatttctgacctccttcctaaggtcctgcaattcaagctgtcacctgttgttatcagaaaagtttccagcacccatctctgtgacacaatccagcctgggaatggcttcagcacctcacctcagaccctgtagcaattcttttccccccataataactttctgcctcccactctaaaatttgcactgcaactttcctcgccacgcttcctcccaccaccttcctgccccttgaaagtccttttaccccaaatatgccctttctataggtctgacagataatatctgctgtgtgggagggtggctccacactaacagtgtggaaaaggggatcaacatggctatttttttatgctttatacctctcacttccctctcaatctcttttcctgtgctaagccgaaggatattttacttttttgcaataccatctctccaaccctcagatttatgtgtgcatatacaaacacagacacacttgcatgcacactgacctcatgacacatccacacttcagcatttatctgcatctgtgccctcctctttcttgctttgccccttttgagcagcacctggcatacatggggcacagttcagacaatcacagaacaggatgaatcacagcttccatggaaatgtcaatgacactgaattgggctttaatttcccccattctgtcagccccacacagattagcacttggatgtccaataattggtatgtgtgcttgtctctccagtgatgcttactttcaaagggaaaaaagaggagctgtaacttgttcattcaacaatactaggtgcttggtataaagagatgactagaacatgttcttttccctaaggatttccatttgggtggaggaggcagatataaacacagctatgtgttaaatagtgtattagagacacatacatggtgttttgagaatcagggaagaaacatccactcttatggggctggataggtatcagaaaaggcttcctggaggaaggcataattgggatcaacaataaatagcatgtaggggttcttctagtaattgaagacttgagagagtttggggaggagtattttcctggcagaaagaacaacatgtatgtgcaaagacagggaggcaccatttaagtacttctttaatgctaattgatttattggagcccactcaggaaggcatcctctccctcttttcccaggtacattcatgtggtaaatagacctaatgcagtttttatctaaagccattttataaccaatagaaattaaatagaggaatatatagaagagacccaggagggtttttgtggaaaatcacagaccagttggtctcgttagaggatgaattttaaagcaattctaatgcttatactcagaagacattgcccaccatttgtcaaaaccttaattctaaaataactcgtggccaaggagacactgctgtcaaatatgcaaccaaaattttcttctcagtttcttcattggtttgcttggtgctcaagtgcaaataatgtagtattcccttccttaatatggatgtgtcaatttttctcatttgcttcaaaaattggaaggatttttgcattttatgagttctatagtccttgggcatgtattacaggcagagagtactctatttataatactgagcttttaataatggttgctaaacaggatcaggcttcaaattatcaagagaggaaacttcagttctgtgagataaggggattagtaaggagaaccccaattggcaagattctccactttagtagcttagtaataaaaaggagttaaggaaggtgagtggaataaatcggtatgatcagagtttggtatgaagtcaatgtttagattttgtacatactatagaccacctgaggacacaaatgatggtttattatggtcaagtttcactatggtcatgggaactacctaacccagcacactaattctctgagggctctgggtttatgaattagctcttttctctggcaactttaagccacacagttccctcaatggaagattttgatgggaaatgtttattgatttggaggaatgacattattcttccaggaaattaggctgcaacccttccttcagtctctccattgttgactgttcaagcctcgagggatcctagaaactcattgcactgtacagctcttgtctcctcctttgcaacacaaactctcacattcatacagatgggatctaatgaattgtactacctaattttcagacaatgaagtgcacttattcattcaacaaccacttaccaagtatgttccagtactggtgtgcatagtagcctccttaggtcacaactttgcatgtggaaaagtgaacttaggacagctttgtctagccctgtggccaaaggttggcaatcaactgaactatccaggtgacaaggtttcctctgacatgttcctgaccatgataacctatttgctgagcatcagcacgctgtaatctctcctctctcctggtctttcccggagtctatctagagtctccttttttctttttccccaccatgcatacctagaataccccttagatttgtgcctttacttagtgactgaaaggtcataaagacaggggcagggaaatgggagtaggtagagggaagtgttgggctctagatttcccagaggaccagtttccagccttcttgctcctttggggcaatgcccagtcttttctaggcctcgcctctggaaaacgccgggctagtcatggcagtgtgttccatttccggtcccctggccgagatatctcactccctgagggagtcacagatgatggagtctttcctggagaccacgaaagccatcggggctctctgctgctgggtgggggtgctggccagcaaggccccctccctagaagccctcttcctcaacccagcaaccctgactccaggcatggagaagatgaacaccaaccgccgcccactagtgagcttgcccctggagctgtcgatgtctcggtgagtttgtgaatgcttcagactccctcaggctgtcttccacctagaagccttgagccaagaagcctgagtatcaccaatggaagggatctttagccatcatcctgtccaatgcctccccattctactccttttttacagacatagaagatgagacccagagagagagagagattgagttggcctgaggtcaaacaggtttcctggtttattctgcagtagtgatgcaaattatattccatttgaccccatatttcttatcagtgcttctctgtccccactcaacatcactgcctcagtgataggcctgctttcttgttggacaggtatgagaaaaactgaaggacccttctcttcctgcttatggctctatgcaaactcttctaggctgggcaaatggcacccagagaaattcaggaagtttcttaggacagatctgaatagaagcacagtattccttgctttactcacagaagaaataatttgccaaaatgagcaaattaggcaacagtgactaactggccagcactctttaatagaataatcgcagagtgtaatggcaagtcagggattcctcattggattgggagctgtgagttaatgtgagctctcccctccagtttcagcaatgatgtttctagtgtttttcatttgccctctctggctagccagggatacagcgcaattgcagacagaattgtaaagagaccaataaatggttccactgatacagataagtcttagagttgccttagctcagtctctgactcaatgtcatgtgattcagggtcccagcaagaaacagatggaccactccgatgggctaatagagagagtttagtaaagtatttacagaggtgtgggctgggcttagggaatgaataagggacagtgaggcacctagaaactagtaacagggggaagctgttacatgcctaggctgaagggatgaaggaaaggaccagaattagactacagcagcagctgccctcatgtgtcagagaggctgcctggcagaacttgtgatcttagtagaggatcacagctctgctactcagccatagcacaggagagaagaagccaggggaaaatacctgacttgtctctccttctatccttgaatgtcctgcctatgtctcccattaaccaaacctggccagaaccagagggtaaggataacacattttgtacaggtctccctccccaggaacagagacagtggagaaggtagagagtaggtctccagggcaaatggaatcaccaaaacagagccttaaagtcaaaggcatcctgcagggctcgctgggagtgcattagcactctagaaaatgcctcactgaaggcatttatgcctctcttgtgatgggcccccaccctcctttctctgttcctgagattatcatgtgtctagatattctgaccttgattcattctagttaaattaccaggctagtgaaagattgactctttaggcccttctgtttagtatggacctatattttagtcccaactgtgccagttaccacctgagtcacatttagcaagtcctttaaattatccaagcctccttatctccccttgtaaaaaggtttctaaatagctggagggttaaatgaaataacaaagtgcctacatttttatacatgtctgacagataacaataaatagtgactactagtatcatttgcttagtcctcatggttggaagctttataaactttctttatgtttattaactgtttatacttacagtattcagcaataacatgctgtacagatttgtagcctaggagcaataggccacactatttagcctagatgtatagaaggctatagcatttgtttgtgtaaatacaatgtaggatattcacagaatgatgaaatcacctaatgatgtatttgtcagaacatatctctatctgtaagtgacatatgactatatatgagattggccaataagaggctgaatgatccaactttgccatgaagatgtcaggttaaaggagcgtcctgactctgtttgtgtctcaacaggcattcgatgcaggacaaaagaagactttcttgtcagcagaatacttagatgaacctttccgggcccaaagggcaatgagtgttgtcagtatcataacctccgtccttgagggtaagtgctgctcactgcattgttcatccactgtgtcatgatgaattcccatgtgagcagcagaagcaatgtctctaactcgtgtcaaagcgtccatctctgtgtactggaattcctaatactcctcattcttatgtcttaggccccaccatcttttatcaatgtggttttttagatgcataatttttcaaaaacaaaataatttgatgaataaaatatcctagctcatctcttgttcaaattagcatctgctttgcatgcatcacaaaactagatttttaaaagtgatctggcaggcatcagagaatttcaggccagctctccggtgtacaagaaatttaaccatccttaattttccaacatggcaaaattatccttttcatggtttcataattatatttttcatggttgtaacttacacagttgtaatttaatttcttgttcaagcccacattatgctgaatattggtagacaatttaagtccattaatcagtcaatttaactaagtccttgttaatttagaattctaccaatcaagtgggaatccactcagtctccccagcaatgtatctaagttccaagccaaagggtagaggaagagagtggcaatggtcatggccacctatccacacactttgccatagagcgtgattgcatccctctaaccttgagcaggaggtctgttctaatccagcctttttttgccttagggtatggagaatgcaaccttcatcatttccagttatcttactcccctagacaaattaaactgacctaggctggaggagttgtaagggagcttgagtgctggtgtgcccctgagaaggagtcctgtgtgttttcctcccagccctaggctgaatcctaatttgaggggaagaagtggtgagcaatagaaaccaaaaaaatgtttgagggatttcaaaacagagccaatgtgtgccctactttctaggtaaagccagaggtggcaagccttagagagagattcacatgcacagaaactgtagagtagaactagccagtaatttaccagatatgcagagatgtatctgttttgctcacagctggatctccattacctagaagagcagtgcattaacaaaggtgatatctggggggtgatgctactttatagtggtgtaaactgataaaaaggaagaaaataaggaatagtcaggtatcttggggtaggatagacttccgctcaaggaagatactgtgagagtagagtaagaaaggcaggagaaacaaagacgtttttaagaaaatctggggaaaggcaaccttagcttaggtcaaccttaggttagagaaggcctgaagcagcctcagagagagccctgtggctccagaatggcagagaggagctgggtgatgacttagcccccagtgaaggctatggaaaaagatgagtgagacccatagagggaaactagagagagaagagccatcttcatggactctcccaccagggaccagatgggagctacaactcaggcaaaatacgcttagcaatgacaaaggaccagctcaactctcctccaggtttgagccctacaaaactcagacacagactcagatattgaaatagtacccaacattgacttaacaagagacagttcccatggtgaggacttgaagcataaattgaattcaactaagttacatttcttgcatacctgagtttgtgctttgagaaatgtgtactcatttctcaacaacaacgtgtacagactctcttctattattttttctcattgataattatttaatatcactgttcattgtaatagagtctgtacttctaacatttttcatggcatagaatttgaccaagctgctattcccacaatttctttcttggccagataggtttcttggtttttgtttgtttgttttggtttttgttttgctattagtcatcaaacagcaaacattgaatacaaacagtttgtttttttcatttattctcgaaaactgttaagcttcctccttctctcttctttcatttattctcttatcaacaagcatttgttgagcccctgttgtgtgtgtggcattgcttcaggtgctgggattcagtggtgaactgatataagcttgcgctcatggaatctacatcctagcagggaaggggacatgaaagatgaatagatattcagatataagaagtaggagaaaaaataaagtaggaaaggagatggaaaattctctccaagaagaacagaaatttgaattaaataaaggaatcagctatgtaagaagctgaggagaaagttcgcagacacaaatagcaagtacaatgcattctgcaagaatgagatagcaacaagcaaaatgcatgtcccaaacacatcccagtgtaggtaagacaaaagaaggtcatgggatgaatgagaggcaacagagggtagtagttagaacactgctctggaacccggctgcctgggtttgcatcctagctcttccacttatggtacacagtgtgaccttggagcttcagtaacttttctgtgcctcagatttttagcctgtaaagtagtgagaatatacttatcttgtagagttttgtgaggattaaatgagtcaggtcaagcaaaatgcttagaaccacgactggcatgtagtaaatactcatcacatttggctattatgatttactaggttgtaaaatctatgagggcggagatgtgtctgttttgctcacagcctgacctccattacccagaagacaagtgcatgcacaaaggtgatatttgggtggttggcggcgggagtgatgctaatttataacagtgtgaactgataaaaaggaagaaaataagtaataggcaaatatgttggggtagggtagacttcccctcaaggaagatgctgtgacagtagagtaagaaaggccagagaaacaatgatgttttaaagaaaatctgaggagaggaaaccttaggttaaataaaagaggtcaaagttttctgagcatagggcacatcatcttctctggttggatgttatattcattacacacatgagacacctgaaggatgcttcatgctgccagagtcgtaataggatttataaaggccacctctttaagagggattatgcttaagaaagtttggcccaaaccaacaggagtttgacaattcactgaactcaaagcatgtgaaccttctatgcttggcatgcaagctgagatttcactgttgtccaagccagaattccagaagctgggtcacagcagtgagcttactggagtggtgagtgccttaaagaggaagtgcaggatactaagtgaaatatggtaagatttgcctggagccagggaattatcccaggctgaaaggactgcaaagcagaagagagaataacatttgaaggaatgaaaaagcctaatgtagctgtaacctagagaaccaggagaactgaaaataaggctagagggatgagttggggccagatcccaagaaactcctagactgcattaaggatatgggacttcatgctaagaggagtgaggtgccattaaaggattggaggcagggaagttacatttgcattttataaaagttactctggatacttgtagatataagaggggaagtatgttgtcagggaaaccagttaggaggaagccaagtacaagatggcagtgcttgaactctggggtagtgacagtggggctgatgggaaatggaaggatatgagagctatctaaggggcataagattcaggacttgatgatgcatatggttctggtataagtgccttaagatatgctgatacaataactcataaagggagcattttaggggaagaagggggctttaatggggaaagatgaaagaagattatgagttgagtctgggatatattgggtttcaggtgcccttggagcatctaggtaggggtgtccagtaggaagttgactttaggatataggggtctagaacttagatgacaaagatggcatatatatatatatatatatatatatatatatatatacacatacacacacatatatatatgtatatatatatatttgaaagcagtttgaatgtaagtggtaattttgaaaagatgcaactggatgagttaacacagaagggttgaagtaagaagagaagaaggcctcagacacagttctaacaaactaaatgtttaatagttaagcagaagagatggacccagcagaggagactgaaaaggaaggtacagaaataggaaaagatctagaagaatacaatgcagagccaagagtaaaaatttcttcagaaagaatagaaaggccaacagaggcaatgctgtggaaaggtcaggtaaaatgaaacatgaaaaggtccaggggctttagtcacatggatgtctttggtgatctaagcaaaagaggattaatggagtaaaagggtaggcagaggtcatattgaaggggcttaaagagcgggtgagaggtgaagaaatggagatatggtgtacagacaattttttcaagaagtttgcctgtgaggaaaaggagatagtaagatggcactagggagtagggagaattgaaagaagactttttggtttttgtgtttgggggagtttttgtttgtttgtttgttttgagcatatttgcatgctaatgggaaggatctgggagaataagagagactgaagattaagggaagaaagggtatattcaacagactcctgcagtggcaggagagaatgcacagtggagacactggtgttaacaggagcagggggacctctttaagcgtaacaggatgaagggaggaaagttctctctgttatcaattttatataggagatccttttgaggtggggccatggtcatgttttaagctggcaagtagatacttttagtctctgtgtctctgcaatcaatcaagttcaacaatgtcaaggctgtttacaaagatgcctctcttttcccatcatgcctcacaggtggctgcttcctgccaaaatggcacatctaaagtgtcctcattcatgactacttcctgtgcttctttttagtgccaaaataggtccagggaagttcttgcttttgttccaaacagggattgttgattttggtcccaggatgtgccaacttctttagagaactatgctttgccagtttggacatctgtagtttctaaaatccagtcagtgattaaaacagcatgacagtgaaaataaatagtctgatctgtggaagagaaatggacatgtgtatatgaaaacacatgaacataaatggtaataacatgacaaaaatgacatttcaaatcttgggaaaatgaaaaattattcaataagtaatgttgatataaataatcagagacaggaaaaaataaaccacatcaatatcttactctttacccaaaataaatttcaaatgcaccaaagttttaagtgaaaaaagtgaaactacaaaagaaagaaaaaaacatggagaaggtattttccaagccttgtagtgagaaaagcttcatatgtaaggcatgtatgcatatgtggctaacctgcataatgtgcacatttaccctaaaacttaaagtataatttaaaaaaagaaaaaaatttaaaataaaaaaatgaagaaaattgaaaaaaaaagaaaacaaataaaaatactactgataaatcttgactacatacacatttttaaattatcaggaaaaaacactgttagcaaaatttgggggcacacagttatttctctaaactgatttttcaagtgcatatagtaaaaaaaaccctaaacactgcaagtgtgtatgcaatgacaactatgtctccttcccactatagacccttcctgctccccagactcctggtgcacccccctcccactccagtttatcttatattcttcaagcaatgttctatgcatatataagcacatgcatgcacatacacacactacacatacatatttttctacatcaccacaaataaatctgcctcattctttttcacaatgtattatgctttatcagttgttgttttccattattattataaacaatggacatcatctttctttgcccacataggctgatatctgttcaagatgcatgtcttgccgaggaatttatagataaacctaaagctaagaaattgccctccatcgaggtgaacacagttacacatccacatggagatttaacggaggcaggtagagagataagcctagtgttcaggaagggatcagaaattggacacataatttggtgggaattggcatagagatggttttttagggctatgagattcaaaaacacagagaagctaaggtgagaatgcttgagttattcaacatttacaagcaggaaaggaaaagggagacaaaaacagaaagtgaaaagaagtggagaaatatgggagaaaaagcaagagatgatgcagtccccagagccaaatgaacactggtttcaaagagaacaatataaattctgtcaaatgttataagggtaagatgagaactggaaatcaattatttgaatttggaagcagttaaagtcagattccaggggctgcagagaaaaaaagaggtaaggagctgtagaaggttaagtgtagaaaactcttgcaaggaattttactgtcaaagaagcagtaatgaaagagagcatggggtccagagagactttttcaaagccgcgagataattaaagcatgtttacctgctcatggcaatggtctggaagggagacaggtctggatgatgcaggccttgaataggtgggagaggaaagagcccggcacaagtgggaggggtagagccacccacgcactgtgtggggcacgaagacagaataccaggtggacttgcagatatgccagagatttagtggtaggaagaaggggaagttcttttgtgaactagtctatattctgagtgaaataaaagggagctcatcaacagagagtaagtagaaagaagagccggaggttagacgggggaagaggaagtgagaaacagtcatctggaagaatgaaggaatggaatataatatagaaacacagccagatttctgggcagggcaaggctggggctcacagatctctaggagggttggtaagcatagttgtgtattttttccagccaggtccagctggttgggtgcaagtacagagtagtctacaaattgggtctattcacagttcaggttttgccaggcaagtacaatgaaggaggagaggggcaaaggaattgagggtgcctacaagggagtagttagagagatggatgtgaaatctaagctgggcaaattgagaagtaaggacatgatataggtgatgggcagtaaaaatatgtaatgtcagcagtttaaaggactggatggggcagatattaattggagttgcaggactaaaggagttcaaaatataggaaatgaataccagagacagagagagggctgaagtcaaaatgttggaggtggtacttattattaacaacaaggtctagaggatgaccgcagaattggggtccaaggtgacacatggctgacagctgtcattgaccacactataatgcagaactcgaggagtctgaacagaagtgcccaccctgcttgaccagcttgtctcagaagtatctgatctgggattgctgccccatgtgggtgaagctcaagacaattctctttgggcttgtgacggatccctttgcagagctcaccatcaccttgtgcatcgtggtgaacaccatcttcatggccatggagcaccatggcatgagccctaccttcgaagccatgctccagataggcaacatcgtgagtgctctggctggtactgccctcactggcgtggtcggggcggggtggggatgatggcagggtgcagttcgggtggggtggggcatgcccttattggttagtgtgttgagccagttagctgagagcagagcagcagtgcaggagacatgtggacactgggttcaggaggtcaagtgtgggaggacccaggctgagctggtgggaatggctttgggatgaacaagcacaggaaagtgaaccaggagagcctggagccagaggcagctagttgccctttacaaaacataggacaaccacttgaattttctggatctcagttgcctctaccttgaaatgaggataaatgtcacttttttatctaaagacaatctttggacttgtctgtttccttccaatgtaattacttttatgaccacaattaacagtagccacgattttcaatgttgtcacttaaggagaaaaagagttggggagggaaggggaagacagtggaagggaggaaacatggaaacaaggttgctgttgtaacaaaagcatcaggaagtcggaacttttctttggcatctagtttagacatcatgctgctttaaattttcctccatcacttgttagtattatttactcttaacaagatacaatccatactggatttcactatatactggataaagtatctgactcagagggacaacaactgctccaaccttgccccacccacaggaatagtaataatactcagatgcttctcatggattatctcattttattttcacaacaaccctacatggtaggcactcttgttattccctttcccagatggaaaaatggagatgcaaaaggttaaataatcttcccaagatcatagagttgagtttagtggccacatcagaatttgaacccagacagaccggctgccaagcccgcttttcttaacccctgaattaagccacctcacaagacttgcgtgtgtgtgtgtgtgtgtgtgtgtgtgtgtgtgttcaaacacacgcacacatgataggcagaagctagaaagggtcagcatcctgccttcatgtccgcagcagggtccaccaagctggaggtgacctactggattcaccagaactgtctggctttggggtccagcttcttataggctgcagacttaggtggagggggaaggcccagaggaaatgtgactacttgtccctagaaaccactccctccgccataatccagggctgtgaaaggggcagcagtaggttctggaacatggtggaatcagcatgcctcatgttttggcagcacctaggctgaggtcacatcctaaagttgatatgaaaaggaaaaatggaaagagaagagaatgcttattcccaagaagtcagcctaagaccacagagggccttatggaatagacatttgagcccacaccctcattctacagttagaaaagtggaagcaagagagagaaaaggcctttcccacagtgtcagaggaaagtgccacttttttaaagcaagaaagtcatgtgcttggtgcctgcaatgagtcaggtgctttatgaatgttatttcagtgtcacaacaacattatgaggttaacatcaccctcacatgacaaaagagagcactaagactcagagaggttaaatatcctgcccaaaattgtatagctggtgagggtggatccagggtggacccaggtctctggaagacacaagacctcaaccctaccccccaccacaccacactgacttgcctacaagggacactccatagatactctttgaatcagtcttgtggcatgagaaagtcacttaaactctcagcctgttttcttctccataagaaggatgcattgtctgtttctcaggctggtgaggggctcagataaaaagatatgaaggaaaagcacctgaccctggtcgttgctttcctccttctctgtctcccttccctgctggttgttgtgttacccgagcctggttctgacctctctcagtgtcagaattctgtcctatttaagacaattagagacacacagagcctaaaagaatcttagaggcaatgaatcattgttcttactagtcactgttacttatgaatgaattactgtctgccaggccctttgttaagaactgcacatgcattggctcattttatgcccattatacagatgaggaaattgaggtacaggaaggatgcattatttgtccaagcttacataagctaggaaatgtctgggctgggattttaatccaggtctgtgatgtcccacaacccacacgttttaactactgaaccagactgactcttcactgacaaaatgatattataataatgatcttaaagactatccgcttattccactcccaccaccattcacgtggaaaaactgcagcatgcacagcccctgagaatggtgcagaaatgtctccattctgtcacgttgactgttaccctggccaatcctcaggagcccacagataacatagcaactgaacaaaacaaaaggattttctattttgtaaataagacattttcttgctgccatttttatcattgcctccgaccccacagatcccactgtgatgaaagcttgtttccactcctaggtctttaccatattttttactgctgaaatggtcttcaaaatcattgccttcgacccatactattatttccagaagaagtggaatatctttgactgcatcatcgtcactgtgagtctgctagagctgggcgtggccaagaagggaagcctgtctgtgctgcggagcttccgcttggtaatgtttttctcttgatggcttggggaaactcccacccagattcagggaagacactgtgctctggggactgcaccagccagctcccccttcctctcctgtccttgtgggagggagcagggtctgactcctgggcgactggagacttgggtctgtggccccagcttttcgctgactcagagtggggacatgccttctcctttctgggccttggctcccttatctgcaccaagaggggacttccaagcactgtcctcgtctcttatcaaataacaataacagcaataatcacagcagctaatacttactgagcacttacaatgtgtcaggcatagcactggacacttgaaaaaacgcacctcattttatgctcacaacaaccctgagagatagtcgtttttaagatcctcaggggtgggtgaggaaaaagaatggttccatgatgacccgaaagtctcccatctgccaagcaagcgaataagccacagacctggatctcaaatccaggttgtctgactccagagccccagctccttccagcctcaaggaagtcattctctgattcccttgtgcccgaaatcacagccccaatgtctcaagcaccttcaacctgcctattagtctcactcacatgcaatgatggctcttctctaaactcagctccaggacgccctctacaggagaagtgccacaggccacccacttttatcagagccacaggtttgtcagccaaacctgtcagattcccaggagtgtcgggtcactaggtctccaggccatctggaggaagcttggcatctcactgactcttgggaataggaaagaggcctgaagaaatgtcacggcttgttagcgcaggccgcctgctctcaggaatctctcagtattaactgggagccctgcatctagacttgaagagaggtgacaaaacaaaggggagtatccaacaatcttcccaaggtcctgacaagtgttggcatccagaggttgaagggggtgcatggttcaggaggcaacgagactctaggacagatctgcttgggaccctatcacaggggccagtgagacagtgctgagcccctgaacttggcgtacctggattaggggtggcaaactcaaatgcccatgtgcagtgacatagagccagccatggaagagatgtgggcactggatatttgcctcaggtagacaggcaaagatgactccatttcacctaggcagacccaaagcagtgcacaactcctgggagggatgtttacatagaaatcaatgtgaccatctcaggccaggtgcagtggctcacacctgtaatcctagtactttgggaggccgaggcaggcagatcgcttgagcccaggagttcaagggcaacatggtgaaaccccgtctctacaaaaaatgaaaaaattagccaggcatggtggtgcacatctgttatcctagctactcagaagactgaggtgggaggatcacctgagaccagggaggtggaggctgcagtgcaccatgatcgtgccactgcactccagcctgggagacagagtaagaacctgtctcaaaaaagaaaggagacacagagagagaggaataaagatagaaaaagcgagagaaagacagatgaaagaaagagagagagcaagagggagagagaaagaaaaagagaaagaaagaaagaagaaagagaaagaaagaaagaaagaaagaaagaaagaaagaggaagggagggagggagggagagagagagggagggagggagggagagagagagggagggagggagggaaggacgagctatggcctgtccattattgtcagagttactaattttccaaaaaagtcagaaatccagatttttgtgcaaatgtctttaatattggctactaatccagtttttaaaaacactctaaagaccaaataaagcatgtcctgagacacagctgtgccatgaaacgctggttgatggcatctgcctaagctgatggtactgtcaccatcccagggaggagaagggtagagtaggcctggtaggactctttatccataacttgaaaatcttacaaggtcagaattaaatcacatttttagaaggacagatttctctaggtatctagaaattgatgtcaagatgtaggcccctaagctaatggtcaatataaggtacctatgcacaatcgtcaagagagcaggagatatcacacccccataccctggcaggcccacagttagttttctaataaaatacgaggctgggcgcggtggctcacgcctgtaatcccagcactttgggaggccgaggcaggcggatcacaaggtcaggagatcgagaccatcttggctaacacggtgaaaccccgtctctactaaaaatacaaaaaattagccgggcacggtggcgggcgcctgtagtcccagctactcgggaggctgaggcaggagaatggcgtgaacctgggaggcggagcttacagtgagccgagattgcgccactgcaatccggcctgggctaaacagcgggactccgtctcaaaaaaaaaaaaaaaaaaaaaaaaacgaacatttctgctacacttggggaagcagaagcttagtgttttaaggtctatgtgctacttttgttctgatcccacagtctaaagtcccaaacaaccaaaaataggcaagtttacttcacagtctgcccctacaggattctgcaggggaatgctaccctgtccccacctcgctgatttaacatgctgatcagtgctcaattccctaaccacacccaccaactacacactttcttgggatctattccacttccctcatgacctagcttagatttcacagcccaccaatattattatgcccttgaaaacaaactcaatcaccttttccctctgcctctttgcgtttttgtgtttgccaaaacctcaccggagagtctaagtcaaatatttctctccaccttgtctgcacctgagctgtgagaaatgctggagaaaaatcaccgccagctggtcagtttcctggttttaattaatagactttattttcaggacagttttcagttttcagaaaactggagcagattgaacagaaagctttcatataccatcaatcccacaacacacacacacacacacacacacacacacacacacacacacacagagtttccctattaccaacatcttatgttagtacctacatttgttacaaataacttcactggtttcccattgctctgagaataaaatccagactcctcatgatggtgtacaaagttctgcataatcaggacctgccagttcaccagtctccgtcttgcccactttgctccagccaaaaaggcctactctctcttcttcacacataacagagaacttcttggctttgggcctttgaagtttttttcgctgtgcctggaatacttttcctttagtcttcacttagctcacttattctcaaactctgtgttcaatgcacttgtcacctccttagaggggacctccccaaccacactatctaaagttggattccttcatcaaattaacctggcatttacaattgtcctgctatcccatgaggcaaaaaccagagtttcttgtctaccgttttatcccaagggcctagcacaaggcccagcacatacataggaactcaataaacacctgttgattgattgaaggaaggaaagaaagagaggaaggtggagggaaaaaggaagaaataaaaagtctgtcttccttctctcccaaaatagcattgcttctcctcccgtcacttaaagccttgctccatttgctctgttagtccattggtctatcctggcaccaatatcagtcttaattatggcagctttaaatatatctgtgtctgtaaatcaagtaatccacctaatttacttcaagaatatcttggcctgcacactttcatattcactttagaattatcttgccaagttacatacccacatacacacaaaactgctattgtttttcccattagggactgctgtaattgataggtcaatttgggaagacttataatctttacataattcagtcttctgatctatgaagatagtatacgctgtataccagtctttcaataaagtttaaaaatgtttccatgaggtttttataattttctccataggatcttgcatatcttcttaaatgttcttttctggcatttttggctagcattttgatatttaacatttttgtatctagaaatgtctcttattaattctaataatttatctatacaatgttttaaattttctaacataatcacatcatgtgaaaataacaatgagtttaatttcttcttttctttcttttttttttttttttttttgagacagagtctcgctctgtcacccaggctagagtgcagtggcgtgatctcggctcattgccagctccacctcccgggttcacgccattctcctgcctcagcctcctgagtagctgggactacaggcacccaccaccatgcctggctaattctttgtatttttagtagagacggggtttcaccgtgttagccaggatggtctcgatctcctgacctcatgatctgcctgccttggcctcctaaagtgctgggattacaggcatgagccacccacgcccagcctaatttcttcttttctaatccttatgccattaggttctttttactagatcactgtgctagttaggacatccagtacactgttgaaaagaagtgttaataacaggtatctttatcaattttctgatcccaaaaagaatcctttcaatatttcaccacctctaacaattgtggcaggctttttttaaagataagaaatctttatcagttcaggaagttctcttttatcaagaatatttatcatgaatggatgtttaattttatcagacaattattctacatgtattgagataatcatgtattttctccttcaatctgttaaagtggtgaattatattaattgattttctaatgttaaatcaactttacattcccagctcaaacctagcttgatcgtgatgcattttttaatacattggaagatttagtttgctaaaaatttgcttaagatttttttatccatatcaatgagtaatatttgatctataattttcctgactttcattgtccttgccaggttttggtatcaaggttccaagattatgccattttttttttaaagccaagggggccaggtggggtggctcacgcctgtaatcccagaattttgggaggccaaggtgggaggattgcttgaggacaggagttggagaccagcctggccaacaggagaaaaccccatctctactaaaaatatataaattagctgggtgtggtggcacacacctgtaatcccagctactcaggagggtgaggcatgagaattgcttgaatcccagagacagaggttgcagtgagctgagatcatgccactgcactccagcctgggcaacagagcgagactccgtctcattgaaaacaataaaaagaaggccaggggcagtggttaatgcctgtaatcccagcactgttggaggcgcaggcaggcggatcacctgaggtcgggagttcgagaccagcctgaccaacatggagaagacccatctctaccaaaaatacaaaattagccaggtgtgatggtgcatacttttaatcccagctacttgggaggctgagggaggagaattgcttgaacccgggaggcggaggttgcggtgagctgagattgcaccattgcactccagcctgggcaacaagggcaaaactccatctcaaaaataaataaataaataaataaattttaaatttaaaaaagaaaaggaaagaaattagctgggcatgatggcacgtgtctgtagtctcagctatttgggaggctgaggtgggaggatgacttgagcccaggaggtcgtggctgcagaaattacagcataaattaactctccattagttaacttaatcaaagccaaaagttagctaaaatctttaaccttcctccaagacaacttttcattccagatatcctttcccaatttattgtaatgataagtattttaattttatcttgtttataaaaatttttattaatcaatgaaaaataaagctacctattatacagacaatctctaaaactgagtaactgaccccaataaaggtttatttctcactcgtatcatagcctaatgcaagccagacagctctaggtgggactccaagaagtgactttgccatgcctgaaggaggccaatataacttcaaagtttgcctcctgcttgtgggaaaatggaaagccaaggtttgttttaaggtttaaacagtgaaaggctttttcagtcagggattttgatttatttcacaatacaattacttcaaaaacttagatggcttcagacctctcattgccacacaaagtgctttctttgacaaagttctcaattgttctttatttctttgctttcctttccccatgcctttctcttgcacaagaaacagtggctacaccattactacaagctttgctaagagttgtttcatttaattggaaaatttaactagtcttcaacatttgaagacttaatcccattgctcactgcctggaatctagaagcagtacagttccctaaatcgtcaaggctctaaacttctggattatattttcttttattcttataaaccagctaaatctttcctgagctaatctctttcttgtactgtcttgaccaacatagccaattacaactgacccacaatactaaggtttaataaacccttcccctagggttgctggttcatgaggctcgtgctctgcctcaaaatttttgccagcaatatttttgtcactgaataacatagattgacattccaagccttctcctatcagcttccttgttgcccaccacatgatcattaagccagtgccacatagttgatgcttttgaaaaggcaataccttttttcaatgaagcaatttctccattactcaagataagtacaactagctgcagtgataccctctaaatctgtgagttaacataatagagatgtatgtctcacagcacattcagtgcttgttgggaagctctcctgggagtgtctacttcaagtagcgcctcaaggatctaggattatcccatatcgtgatgtcaccatcttcagttagtgacctttatggtgaacatgaaagggaaagaaaaagttcagggggtttaaggctatgcctaaaagtcatgtatattacttctgtctccatctccattccaccagacagaacccactaacatgaccccaactatttgcaagcaaaactggaaaacagtcttccgttgtgtctgggaggagaaaagtgaatggagactatatgaccagtctcttccacatctcacaagacattgttgttgtgtccactcaatgtttatttagattcactctcatgcttagcactttcttgctctttatacctttgttatagagccagtgggggctcactgcccaatgctctagaagccaatactatgactttggaagccaagacgaggacaccaggcttttgagaaaagaaaagcttaatactgcaagctggctggcaagaagacaggaggtcaagctcagatctgtctccctgtgctgtcttcaaggcagtatttttattagaaaatgtttagtgggtggataccgggatttgcaggtgattggtggaaggaaaggggaggtttggagagtccatgggcctgcacagttatctcttcatgcttactcatgggttgcatatgcaaatctggggggagttagtatgcaatatgaagtggaaattcagtccatgacgtcagcaagctcattctgcacaaactccagtcggccatcctggttccaattgatttcagcctgttttttcatcatcacacaaggggagggagtttcagtgtctcagcaagttgtttctttacctatctgctatcctaaaaactcaagaatttttgtaagttactgatttcttactctttggaacacagtttgagtttcagattttcagtgagttatttcttatctggtatcctgtaagcctaaaaatttagttattgatttcttcaaccctttggagcacagtttcacattcttgtatattacacattacatattacttctgggatcactttctatctacctgaagtacctcctttagaatttcttttagtaagtgccttctggccataacctctttgtttatctgaaatttgctcttcagtttgcccgtgtctttgagagacatttcttatgaatgtaaaattctagttgatactttatcttccttcagtgaagatagtattccaacaattagcctccattgttgctaatgagcagtcagctttcaatttaactgttattccttcctttctggatgctttttaaatcttctatccatctttggtgttctgcagtttcactgtaatatgtctaggtgtggacttctttccatttataatgcttaagatatactgacttcttgaatctttagttttgtaattttcttcaattctggaaagttcccagacatgatgtgggcagtcatagcctccacgccattctattttttctccttctggactttggttagatagatgttaaactctctcattctatcctctatgtctcttacactattttgttatttttcatcttatgtctctctaggttacattctgaataatttattctgatatatcctcagttcactaattctctcccaaactgtgtcaaatctgatgcaaaccttcttcataatatttttaattttaagtattatatttttcatttctaagagtgtatttttcacaacttgttattgttatctatagtttttttattctctgcacatagtttcaagttattattttatttctttaacatattatatctaattatactgttatctctgactaataattctatcatctgaagaaatggaatgactatttccacatctgtggtttcttcaagatctcattcactcttgatgactcattccttctgtttttgtttgtttttttactgcaactcttaaacaatttttgagggaatagtttgaaacctgagataaaggcaggttcctccagaggtatttgcatttaattctgcagagcactttgtagaattgctctaaattaaattctcaacttaaaatacctaggtagtgtgaattccagataaaatcctatatgagcaccactttgttgtttcaaatgctcagcgtcaattttcctcctgtagctggtacctaacaccagccattcaattttccttgcattctcctgggattgtttgtggttcatccttacatgaagggtatagctctttgggatctagtcttaaagcagggagaaattcctgctaggcttacaaccttcggcaggccatggactacgtttcctgctccccatactagttactaatgctcagtttttatttgtgtttatcagctgcctctgtgaccagtccacagagttgttgttttaagctctgcttcccatatgaggagagtaacttccagattgggtgtaaggtgaacgtggacccgctctcccccatcacataaagaggtgcatacagcacttactgtataacaggattaaacctcctcccgtgggatttactcacggatatgggtgataaaattgtagctacactgttgtgttcagcattgcatcctagcacctaagccacagcctggctcttagtaggtgctccataaacacaccttgactgacagactgacagttgagctcagattttttttcctgacaaattagagaaccatacaaatatattttaaaacacatacatttttatgcttgatgattttgctgtcttgtgggacttagcatatttgagtttacagtgaagacttttgagacttcatcttttctcagtaactaaaccattggttccatgagagcaagagcccacacacctctcttcatacacctcataggctagcacactgccatgcacctgcacggctggagttctggggggtaggttcgttggtcaattaaatcaacttatgaatgctgagtccatgaaatcatggacatttgcagtttcaaagctggtgggagcaacagatgttgtccactgccccaagatgagaaatgccctaagagatgttttgccaatacctatcgaatgcagtgggtcatcccctacccgaaggaggctggtctctcttcagtcataaataagcttgttctcacttatttgtgagccccatcacacccaccccacctccacagaagaggcccatattcaggagggatcaggcctgtggctatagaacagagtacagatcgcaaggccaccaccccagtagaagaccctgactcagccacagtcaatgaagcacattgatacttatgaaccatagaaggcagatcatatttttgagtaatttatagcataggaagaaaggtctccaaaagcagtgtccagaaaacgccctggtttaatgggatgagaggccttgtgtttttcccagatctttggtttccaggcaaaactttagatgaaaggtaatgagcacagctaccaaaacctgacggtctctgtttctctgcagctgcgcgtattcaagctggccaaatcctggcccaccttaaacacactcatcaagatcatcggaaactcagtgggggcactggggaacctcaccatcatcctggccatcattgtctttgtctttgctctggttggcaagcagctcctaggggaaaactaccgtaacaaccgaaaaaatatctccgcgccccatgaagactggccccgctggcacatgcacgacttcttccactctttcctcattgtcttccgtatcctctgtggagagtggattgagaacatgtgggcctgcatggaagttggccaaaaatccatatgcctcatccttttcttgacggtgatggtgctagggaacctggtggtgagtggtgaaccctgctgggggcactgtctcctggggaaaggagaaggcttctgggttatctgaaaaagctttgatctgcatttttatgcccagattgtacttctctggttgaaaagtcttcaaacttttcaaattcatgtgggattcattacaagaagtgtgccttgggaggcagtctgacttgcaggaatgagaacatatgattagaaaagaaagacctggtgtagaatctctgctccaccatttactaggtgggtgaccccaggcaagagacttaatctcctcaagatctaatttccttaaaatcaagaaaataatgcttactcatgggtttactgggagaattaaatgacaggagatgacatatgcaaattgcctaatgcaatgtctgggctgaggcaggaactcaataaacggtgtctattagctgttaaaggaaaaatgtccttccccaatctgagggggctcagaaaacatttttattcagggaagtaagagctgactgatttctccaagctgcacaggtcctagctgggagcagggggagaggctgcagggagggggcacaatgggtcacggacaacatccaaggccacagaaataataacaaaatctactccatgtttggaggaagcccctctggagactcacttgccaataagccccaataccccttctccgccccagcctggccccctgccctcagcttgtctccacccactctggtcatggtggggtccttgccctcctgggactgactggttgtgtgggaggatgcagtcttccagaagcccctttcttattgccctggacatcaaccaacttgggttctttcctcatgagttttatagacagaagaaagctaaaccaagaaaagggaagcaacaacaaatccagactctttagtcttttccaccctggtgcctgagccagggatgcctctgcctgcatcccagaaactctgttcttccaggctgagcccaccatccctgcagagccacagatgcccctcaccctcagacaggaagtttacccctctgagcacttttacatttctcatatcattttgtcttcacaaccgctcttcatctgctctcaagtgaagaactggaagcagcaagatgtgcccaggattccagagtcaggaacagagcccagggctttggcacatgagggtggttgcaggaagggctggtgccttctctctgttgtccctaaatgtccctctgctcagcggggggctcctcctttatggtggaaaatatgcttccaagcctcgtccactgaggcgggtcactccaggacatccccaaactttccctcaactgctctcagaaagtccattcccccaaaagggacagcatcccgggtgggcaggaagaggcccaggccgtggctgtcttgccagccagctgctaacccggtaggccaatgtggggctcagcttagagattgatcaatcttcccttccattccttctcttcaggtgcttaacctgttcatcgccctgctattgaactctttcagtgctgacaacctcacagccccggaggacgatggggaggtgaacaacctgcaggtggccctggcacggatccaggtctttggccatcgtaccaaacaggctctttgcagcttcttcagcaggtcctgcccattcccccagcccaaggcagagcctgagctggtggtgaaactcccactctccagctccaaggctgagaaccacattgctgccaacactgccagggggagctctggagggctccaagctcccagaggccccagggatgagcacagtgacttcatcgctaatccgactgtgtgggtctctgtgcccattgctgagggtgaatctgatcttgatgacttggaggatgatggtggggaagatgctcagagcttccagcaggaagtgatccccaaaggacaggtaagagttatccccaagggacagccacaggcagtggggaggggcttcagggcttgagtgacaaagggcaaaagggaaatgcagaggagaccttgacataaagaagtttaaaccatgccaagctttccagaggagttggcgtttgagcagggcctggaagaaaaagtcagaattccccaggcagacaaacagggagtggggggcagcaggtgagcaaaaggccaccttgaggtgcttggggattgtctttcacacagctgtcccatgcgctctgcccaacccaggctctgtgcatgagatgctaatgagatttctctaagaacaggatgttgtccaagagcaaggctcatctaatctttaccagcatcctaagaagtcctgattcttatgtgactcatttagccagcttttccccacaagtggtatcacagggaaatgacacgctccttttggcaccaactaatttaaagcacatttgagccatttgataatatatatttttaaatacttggcactattccttactaccttaagctggtatatcaaccctcgctaacctcttctcagtaactcagggcattcacctctgcccaacgtgggaaggcagggaaccctgtgaggcctcaggaacatgcagggctgctggccaggttactaagtggtccagaaaagctgtgctttgagtctgtagctctcccatagccttcttccctgcagtcgtcacttgtgttccagcagctgctgttatcagctgccatattttacatgcctttgtctaggtaacagcagagagcatgaactctgtgacagctgtctgccactcagaagcattttcagttactttggggctcttagggagctccaggtggccaagttccctacaattttgacctctggacaaataacaatggtcatggctaaaatctattgagccaagcacttcgtgcaaagtgttttacaagcgctaacatatttagtcatcaaaacagctgaatgatgcagatctagccttttcaattttgaagctgggaaaaatgaagattagagaggttaaacaacttgcctaaggtcacacatcttataattaatggagcccaaggataaaacataggtctatctagctatagtcttcatgctcacttcacacacgtgtatgtatatatgtatgtacatgagttgcatatatgaaactcttggctctggcagcctgtgatgtgcaagatcccttcaaatttagaactggtcatctaagggtggggccaggcacccagttgggaccctctctcactagcaggagcagctgcagcaagtcgagaggtgtggggaccacctgacacccaggagcccaggcactggaacatcttctgaggacctggctccatccctgggtgagacgtggaaagatgagtctgttcctcaggtccctgctgaggtaggtatgtcagcttcctggagaggttggacagccagccagacactgagcagtgggctggtagaggctggagggtggcggtgaaggtggggtattccagactgcactcaatcacataacctcatttcttatcctgggaatttttaaagtccctcccaacctccggctaatccgcacaatttcaactttcaccatataccattgccacaatctcactccagggtggttctaggtatagaaagaaagagtgagactccacaagctgtgggacctaagatcagttcccaaacctctctgagccgccatttattcatctatgaaactgaatggtaatgcctacttggtaggattattttgaagcttaaatgagatgctgcttgtcaaatgtttaggtcctgcctgagacaaagtaagtgcccaggaaatgacagccaagaaaaaaggaaacgaaagacaacgcacaaagaaagtcaaatatctttcagagccagcaaataagagttggaggtgctcacagatgaagaagttttcccttgtgattctcccccactttcttttgtccacatcattttctctaggcaaaagtagcctggggctagggagaggctctctataggtgagtagtgaagtgacagcctcacagagactgagctggaagattagaggtttaggattgtcttatacaaggtaaaaataaatgtggtttcacttacaaatcttgaaggaaacaagctatagggaaagaggcatctataaaagtttagcatctttaataacactgccttcaattcaagaatttaatttgacacctagccactgagtgctgactttgtgacaggcactgggctcaacagagataaggaagtcataattcatccccaaagttatcaagcccttcagcttgaagaatgtcagctactggctgtgtgccctaggcaaggctgaccacagcagggtaagataagagggagggctgggacgggatttgggggctgtgggtgaacagaagccgcttggttcccactgggtgagggctgtcacattctgcacgtggatgtcatgcttcttcccaaatgttccaaggactcccctggctagttgtccctactcaatgttttcagtacacaacttctgggtgttggttttttgtttttgttttcttgtccatgaccccggctaggcaggaggggcctgacagcgacaaatggggacccgccccaccatttgggtccattagcaaagctatcaggtttactaatatgagagcaacttcaacccctaattgaattcatctggagacattatagggctggagctgccaggagggcagcaggcccctgcagcattactccatgattaaatattcaagcccagtgaatgctgagagtcgttatgggtgtaattacggtgtctcgggccattgccagcactccatcaggggccccgaaggtttacagtctcacacagctaagcctctggggctccagggagaagagcagtgttccaggcctcagctggcgaggcaccaaacatgggtgcagttgaacctgcagtgaccgtgtgcaattccccgggccccgcggagagacgagttcactgccctgggcttctcccctgcagggagtggacgacacaagctcctctgagggcagcacggtggactgcctagatcctgaggaaatcctgaggaagatccctgagctggcagatgacctggaagaaccagatgactgcttcacagaaggtgaagggacagccacaggccccctcacactgatgttaattagggccagaatccagttgagcgaacactcacctgggatccacagaagacaaacaagctgtgcccacttgctgcctcactcccaggcttgagggcgcccgcatcagacacacatgccccaggtggcagcagcctggccgtggtatctgcatctcatgccctatcagacactacggagagacgtgggccttcctctttaccctcaaaaacccctccgtgagttctaaaccagccctcttgagttgaaagggggaaacgtagtcaccaccataaacaccactgaaaactcttgatttggaccatgaaggacccagaggaaggccatgatgtatctgcttccctcaatcttttgtttagctctcaaaagcagaacctgtgtcttagtcatctttcctctcagtgtttagaacagtgaggcacattacattctcaataaatatttgtgcaatgaatgaatcaagagtccattctataaagggaattgtggcctcaatgctttctaaaaatacaaagaaaaattttttaaatacttgagtttttattaatagttttatttgaccctgggctgggctgagctgggctggacccaatccccatcccagccacgtcgtggccctcagttcagcttgggcttggagcatatccccctcaggcacccccaggctcatacgccgtagcttgtctgttttccaggtataggtgggcagaaggacagggaccactggtgtcatctgtaagaaggatatggctaggaaaaacatcagagtgggcaagactgatgatggagaggaacacctgttggtctggattgagggactccctggaagggacccctcttcacccatattccaggaaagaatttttttccaagggcatgacaagtgggtttcctagcagaatggtttctctgcagcaggagcagaaattatcccctttgcccactggccatcacccaccatcagtcacctctccccacaggatgcattcgccactgtccctgctgcaaactggataccaccaagagtccatgggatgtgggctggcaggtgcgcaagacttgctaccgtatcgtggagcacagctggtttgagagcttcatcatcttcatgatcctgctcagcagtggatctctggtaaggggaggcatagtccctgcccccaaatcctccagataggaatctcctacaatccaaaggccctggagctgcatcagtgggttctcctgactactgagctgaaagtccccaaccttgtcactagaaggagagctgcagcccagggcgagggcccctcttagcagcagagcatgggaggtgttcaaggtgcccgtgccatggcctgccaaacctggctgcaagcatttgagtgagtgagtgtatgcctcccactatatagatggggaaactgacactcaaaatgtttaaaaggcttgtccaaggtcacccaacttgtcagtagcaaaacccagctttgcccttatttaatcccgaagcccctggcttcccaccctctgacctccccaacacacggccttctctgaaggcctacaatacaaaaaggactatctttccttatcaaaccacttccaaatgctactaattactcctttaaagctcacagaaaatcattacaatagcacttctcaaaatttaatctcccaggagcttgttcaaatgcagattctcattccataaatctgtggcagggcctgagaatttgcatttctaacaagctcccaggtgatgcttgcactgccctcagtgacccacactttgaataacaaggccttatgggaatagagattcagagttgggagacatctctaaggccctggctgaatactgggctttgtagagcaaagaaggaaggttctctctgtactgtggcttaagctccttacacaatctcaactactccgccaatagaccaaggtagacatagacacaggaaggaacttaacatcctcagttgtttgcattttctaaatgaggaagtcaaagcccaaaggcatgaggggcttcaggtaattagttgaagggctgggaatagagagttcagggtggcagctaattagttgaagggctaggactacagtcccgctcttccgattcacggctgcagtgttttcactcatcttgcgcctcatgtgtcatttactctctaaaaacaacctactaaatatctaggcctccatctaaatgccagattgtccaggaagggtgacaaaactgctcggtgcatggcctcagctttagggaggagcacaggtgcgggacgaggcaggatctgagaggtgggaggaaaactagggtggcaatgacgcaaagccaagggagaagagagtttcggggcagggactggtctgccatcctgggtggagggggaactgtgtgacagcggctgcaggtgcccagtgccctggcacagggcagtgattgtccacacggacctcagcacagtgtagaggccaaattgcaggggcaagagagggctgggcagtgctttctccacacctatgctcttctccttccagtcctgctggattaaagtaataaccacatgtgctgttggccaggtgctctcctcactacgtcattggcttgtgggccttctctcctcattttgcttctctgctctcccttgctccctcccttctctctctagcccccttctcttcacaccccggtccaccccccacattcccaggaggaagctcagacctgcagcactgcgccagcccagcccgccccctgcagctctcccttccctcccatctccttcccctgggactgaacaggctggcaccaaatttagccttctttaggctttcactttgagtaccttttaaaaataacatgcattttcatctgacaaagtaaagtaccaaaaaaatacttggaaattatagaaaaaggtaaagaaaaaaaaatcatccatttccctatcactcaaagagaaactcacttgaaaacatgctggtatacctctttctcatcttgcttatgcataaaatatacacatattacaaaaataaaaccacatttatgcattctataacctcagtacatttttctcagtaaatagtctcatattatctcatttaatggctataacatattcctttataatttactcaaccaatctctatgtttacttctaatacacattgaatattccctgtgtgtactcccttagagacgttggataatctcccatcttagtcctcgtcctagacacagaatcggaagctgagaaaagatgtgggttcagttgaaatccggcttcagctgatcccatggaaagccctgaagcacaaaggacaccaaagagctgtcccaccttgaggcaaagaagacagccttgtaaatccccctgtcactgtccctggctgagggctgccccagcggggaggataagcatttcccaaggtggacacagtttcctccagcccagcgaagccatcaggaagggggtgtctgcatccatgaactattagcagccgacactcccagcagatgaaggataggggcactggccccttaaagaggacctgagtgggcaccaacagcctccagtgtccttaggattagtgcttgaaggaggaattgctaggttcctgaaacctctgagtcacattgccaatttggcttcacacaggactggccaggttttcactcctgccagtcacttgtaagagtggccgggcgcggtggctcacgcctgtaatcccagcactttgggaggctgaggcgggcggatcatgaggtcaggagatcgagaccatcccggctaaaacggtgaaaccccgtctctactaaaaatacaaaaaattagccgggcgtagtggcgggcgcctgtagtcccagctacttgggaggctgaggcaggagaatggcgtgaacctgggaggcagagcttgcagtgagccgagatcccgctactgcactccagcctgggcgacagagcgagactccgtctcaaaaaaaaaaaaaaaaaaaaaaaaaaaaaaaaaaaaaaaaaaaagagtggcagccccccacagccacagcatcctagggtttcccctattcttttccatctccaccagtctgataaaagaaaaacagcatcttcttttaatttgaatttccttgattaccagtgagatagaacattctttttcagaggtgtgttggcgattcttactttcatttttgtaaactgcctgtgaacatccgttgatgcttttatttttaaacaaagtcactgttagcatccctttggttcacttccaaaatccaatttgagaaggttttctttctcccttgcattcagcatccctgcaagtatcagcagggctgtttgtccccattggccctgaagaagtcatgctttggatctcacagtacctcctccactatcccactttacctccccacagcaaacaaaatgctactggcaagctgactaccaaatccccttccagggactgtggtcagggctggctgggtccttccctatcagtctgggccccagtgctgtgggtccaggcagcctgccattctgcatcctttcttccttccaggcctttgaagactattacctggaccagaagcccacggtgaaagctttgctggagtacactgacagggtcttcacctttatctttgtgttcgagatgctgcttaagtgggtggcctatggcttcaaaaagtacttcaccaatgcctggtgctggctggacttcctcattgtgaatgtgagtggctcagtgggaacacgtggggtttggggtcctcccctctgactcctggctacagctagggcaaaggaagctcagagacctggccctcaagggctactccaaagaaaagttttgagcatttagtgaggagtctgagaatagccctgacacccatgagtggtaaagtccaggcagtatgtgactgtgacacaatagtgactgttaggtgagttattaggtctccattcagaaagatccctgcaatcctctgcatttttacatccaaagtgagatgacacatgcagctctcagaggtcttatggccctgcatccatagatgggtcttctggaccttggggagccatgaactgtgagcacagagaatcttcccacctgcggttctgtggtcctcacacctggctgcacttgagaatcacctggggagctatgaaatatgcagtgaccgaccaccactaccccagagattctgatcttattggtcttgggtggtgcccaggcacctgtattttataaatgctcccaggcatttccaaggtgcagccatggcttagaaccactgagcttatactgctgcctcctccccagtggcattgaaaagaacagagggcgcatttggagaggtaatgagctggagttcatgtgttcacactcatggtaacctgtggccagtaatccctgcattagagaattgactgtgtgcttctcacacatcagacatgtgattcctcagtcatctcttcctcatcttaaccaccacattgcactatcactgtctaggccactaccttctttgctttgcagcatggttaactgagttatctgttcactgccgcatagctgagggtttctgcaagcagggtgaggcatgtgctgtgttggtctctgcctgccccactcaagcagctgccagcagcaaggtctgcccagcagaggtgtcaggaaatgtgtctgtatttggtgcttgcctcctgaagctggatgaggttcagcacagaacattctgtccagcctcctgtgctggcaggtcctccatagcaggcctgtgcattcaattctcttcttccctgatgccaatgcactagcagcttcaggccactgtaccacaaggattagctgtgaggcctgaaatctgagtcatgggtgataattctgtgcatatgaaataattattcataaatgaaaggaaaattatttattccggtgtcccacccctttgggggcacagtcactcctgcttatgttgatctcaccagtctcagtcctaatcaccttaaacggtcatgcactcatttcatccatcttcctactgattcttccttccaaccatccatccttccttccatacatttcaccttttgtatccaaccattcagtcttcctttttccttcctcccaaacatccatccatctttatttcttccagctgtacatcttcatcagtcctccccttccatccatccattcccattcttctttccctcttctcttctgcccaatcttttattctaaacttccttccatctattcatcatccttaacccttatatctttctatcttttgattcattcttctatccaactgtccaatcatctaacattctgttcactcattcacgcatcttccatccaagcatgcttctactcactcatccttctatccactcattcttctatctttccattcttgtttcaacctatccatctattcttcctttcttccacttatctgttcattcatccctttcccttccattcatcatccattcatccatcctatcaaccttccagtcattcactaatttattccattcatctattctgtccagctccccatctttccattcatgcattagtcattttacccagccatccatccttctcttatccacctatctcatctatccattcactattccctgctttcatacttttcctttcttgtttgtttctcccatccttccattcaactatctatcctatccatctttttgtgtctgttatcttttaaaattttaaaaaatatattttattgtatatatttgtattagtctattttcatgctgctgataaagacatacctaagactgggcaatttataaaagaaagaggtttaattggacttacagcttcacatggctggggaagccttacaatcatggcaaaaggaaaggaggtgcgagtcacgtcttatgtggatggcagcaggcaaagagagaggttgggcagggaaactcccccttataataccgtcacatctcatgaaacttattcactatcatgagaacagcatgggaaagacctgctcccatgattcacttacctcccacagggtccctcccctcccacaacacatgggaattcaagataagatttgggtggggacacagccaaaccatatcaatttttaagggatacaaaatgatgttataagatatatatatatataaatgattactatagtggaacatattaacatatccatcatctcacatagttacccatttctccccctgtggcaagagcagctataattactcagcgagcaaaaatactgaaaacaatatgctattattaactatagtattcatgttatacattaaatctatcctatttatcattgtatcctttaattcatccctctatgcaatcacccttcaacttttcatccagctgtacttctttctttctttccttctagccatcccaatgatcctatttttcttccatttgctatacatctaactattgaatacaggattgtcttatgaagtgctttgtaagaaacagaagcacagaataaatactcactatctccaggatcttacactttagtctttcagcagacaagacacacatggaaataaatgtattataagggtgaatgtgttgagcactgctgggggcaattagtatcttggagacacagagacatgagccttcttccactcttggggtggggtggttgagaattcttcctatgggaggtggcattagatgtggggcatagaaatgagcaggaccaaggagctgcgagaggactggggaaggcccgtcttagctaaaggctgaccttgaacaaaggcacagacacaagtatgctcagggaacaatttgatttgggtagaatgtgtgggtgaaatatgactggaaaagtaggttgtgaccatatgacacaggctacagagtatggagtttatcctgagggtgataaagtaccagtgatgtttgggagtaagagaaagacatgatcataatcagatttgcagtggagaatagatgcatggtgcagtactagggcctggagactacttgggaggctagtgggctgagcagtgggaatggaggtgggcttgggtggacagactttgctggagaggcacagcacctgtctgccccagctgcagattatccatgtgaggcagacttcccagggggctgagcaaaagactgaatagggttcagcatggaactggccccaaacctccctaccctcatgcacccaggcagctgggtctcacctgctgatgtctggagccttgcatgaatgaaggaagagggtcccttccattccggttctttgtcctggtgcaataagccactcatccaaagaatggacattgcttggggctctgccactcaagtataaagcccttcttttctgaagctcctgtgtgcatcccacctaactgccaggataagctgagcctgaattcagcccaccatctgtggtgtggctaagatctcacaggacagggtcatagcccgtatctatgacatctccctggcaccttcaaagttcctagcaggggaacttttttcatgtaagtttctgtcctttgcagtctttggaccaccacttaaagaaaactgacagaccaaaaggggctcacaagtcagtcattatatctcagatatctattgaagctagatctcatggacccataccagaaactttttgaagaactgcagagctatcagaactttggaattctcttagtctgactttttcattttacaaagggtgaaagtaccctggactagccaggcactaacccaagctcacaaaaaatcagggttcaaatgggaattagaccccacccaaaccactattctttccaccccacttctctgagcaaatataattcagattactatattcctcagaatagactctcagcatagcccctaggagggaacatcatgtctccaagtctctgaaaatcagtttcaaggttgttgaggcctgactgctgcccctagaaggaaaaggaagagttgatttaatacactggaagcttggccacctacgtaccagaggttggtgatgttagagactgagtttttcttgcccagattgtttaagagagtggtgaataaaatttttaataaaagggaagagacaaaactctttctagacctctcattggagttccgaataaggtgggagctaggatgatggcttagacgtgtaggaatgggaggctgggcagggagttcctgtctccttccacgaggactgcctttctggaaacctagagtgatgtttctgccctctcctgcactcagatctcactgataagtctcacagcgaagattctggaatattctgaagtggctcccatcaaagcccttcgaacccttcgcgctctgcggccactgcgggctctttctcgatttgaaggcatgcgggtaagtctgatctcaaaacttctctcatctggccaggcacggtggttcatgcctgtaatcccagcactttgggaggctgaggcgggcggatcacctgaggttaggagttcaaaaccaccctggccaacatgccgaaaccctgtctctgctaaaagtacaaaaatcactaccaccacgaggtgtggtggtagtgagccgagattgtgccattatactccagcctgggtgacagagcgagactccgcctcaaaaaacaaacaaaaaacttctctggtctgcaggttttggtaacccttccccctttatgccctccatcccaccaaccctgagctccggggccccacctccaaaggtaggctctgagtcttcacttcctgctctgactttggtggtgctgcatgtcctaactctcttagttctctttcaagtctttttgtgggcccatcttcccttgtcacccataaatattacagccaccaggacccagacctcaccccctttgctcttagtgaagtaatcctgaatcatcgctccacaagcatctattatctcaatcacccaactctgcctcttattgccaacatctccagaacatcccaagttctctgtctttccatgacaaatgagtctttcctctaatactccatgagtgacatcatcagctcattacctcagctgccacccactggaatgcttcttctctcctacttaatgcaatcatcaggtcctgtaaatttttcccttccatccacccctttccttatccaccactgtcagcctccaccttgccctaactgcctccgtcaggacagaatgctcacagccagagccttgtcttagagattgctgattgacacccacctcttcctcataattacaaatggctccccagcagaaagtaaggttttgctttgctccactatcattggctggaagtagtcatcatagcttcaaaaacaaaagtgggcttttgaaattaacttgtacctttacaaacactaggacccgaagattgaaatagtttgaaatttattctattttgtatctaatagattctcatttgcttatttacaaataagctattttgtgaatatggatttaggttttcactggttcttgaccacggcatactttaaattgtatttaaattgtgtttgtgttttatgtatggtatttaaggagaataagtcaaggttctagaagtctgtatgtgcaagtataatacacacactcacacttctaaatgagtgcagtatgcttgtaaactcatccatcttctcactgcaacccaccctgaatgaggttaagggaagaaggtctaaatccatcttcagctgcccaatgtctctcagtcttctgagtctgaattattgcactaattaacccacttctcttgcttcttccaaaggccactggctcatgaagcagcctgaatgagtatagaaagagatagaatccagcagagggggtggggcattgggaggttccaggtctttctctatctcccaccaggtggtggtggatgccctggtgggcgccatcccatccatcatgaatgtcctcctcgtctgcctcatcttctggctcatcttcagcatcatgggtgtgaacctcttcgcagggaagttttggaggtgcatcaactataccgatggagagttttcccttgtacctttgtcgattgtgaataacaagtctgactgcaagattcaaaactccactggcagcttcttctgggtcaatgtgaaagtcaactttgataatgttgcaatgggttaccttgcacttctgcaggtggtgagtcaaccatgagatcaaccatatctcttgctttggccgctcaataaaatggagagtctaggttcccagaagatgctatgtggggactttgcaaggagtagcactcagtgtgaactgaggtcattctctattcctacagactacaccatgaggctagagggccttcctagtgaatatgatatcacagtggtgcaattacacaagtgtgggctagtagaatagcataaagggatgggcctgccatgggattatcaggtggtgagttaaaacacagaacctgtacaaaatagacacggcatagccacatgttcagtcttcaacttcacatcatttcctaaatggtaataaattatgtctcattaggtctattgtaatgatatataatgttggtgataatgacagtcaaacacattcatcctgtctttctttctttcatcatccagtcaatcactcatttcttgccttcatctacctgttcattcagtcctctgttcattcaagtgttaatacaattacttatacatttgtcatgcagttactcttgagtgtctacattccaccattggttcttgcatttattcaacaaataatctctgagtagctctggtatgccaggcatggtactactcagccctgggagatacagtcagaactgggcttggacactgatgctgtatgagaaacagactaataggtgaattaaaacagctcattaagtgctgtaacaggcctaggagtgtaagaactaagatgtcttgcatgctctgaacatgctggaaggcacacccagtttctagacctcaagaatgctaaagctgaaggcaggaacatggaggtcttctattctcaacttctccatctggaagatataccattcttacatcatgtgcataaggtgggaaagtggctgagaaaatggcagccctgagaggggaaaccttaggcaagtgcacagagcagacttgtagcaattggcactagaaccagacacctagacactcagtcctcagtccatactacattctgaaaggctctgtgtctttaatgctactctattcttaaacagccacatgtgggattactttaaatcatcatatgagattagtcaagtaacccaagggaacttttcctttcattctttctgcacaagccctttccaacacaggactctctcctctctcactgggccaccatggcttgggaagggtccagtatagatggatgggcagacactgagtggcctctgctccttgtctccaggcaacctttaaaggctggatggacattatgtatgcagctgttgattcccgggaggtgagtctcagcccactgtccctacagccttcccctctgtgcattctacccatatcagtctgcatttgaaatgaagtgacgatgaccctggtactggaagaggcgatcacccagcaacctcacactgtccctccttgcagcagtgtccagctggctctctgttgagtgtttcagccaccgaggctttccccctttcatctacactccccaggcttctcgaggttttcctctgttcactgttgaggaaagcatcagataacctctaagagacagttcatgtgagccactccctggacaagggtgggagcaaagcaagggtagtagctaaatcaaggtgcatagggaggaatgaggtagaatctcaggaactatcataaaacccaggatgggccaggcgcagtggttcatgcctgtaatcctagcactttgggaggccgaggtgggcagattgcctgagctcaggagaccagcctgggcaatacggtgaaaccccatctctactaaaatatgaaagaaattagcagggcatggcggcttgtgcctgtagtcccagctgctcgggagactgagacaggagaatctcttgaacccgggaggcagaagttgcagtgagctgagattgcgtcactgcactccagcttgggcgagacagcgagactcaatctcaaaaaaaaagaaaagaaaagaaaaagccaggctggggagacactattggggaatgaccacttcctgctgtggcaggcactgtcaattccctgccacctcttcccttagcccacttctgatttcacctgcaggctgcacttctgattctctgtataaagactccagggcttaggagcttgtgcagcaacttctcccccaagtaccagggatttaatgtccctaggggcaacccttaccaataagttttgggagtctgaggataaatactccagtttccctgtcccttggtgatataatcctgcatgtgctctacacagttactcagaggaccccagtaggattgcgcttcagttgcccacaatgatgccctgcttaacaacatcctcttcacaggctcttctcccattcccgcttattcttccccactccctcattcctgcttccttggatcacctcccagataaatcacctgcacccaggtccatgtcttaggcttggctttcagagtgaacctgaactaagacacccaccctccttcccactctcccttgtctggtcacaggtcaacatgcaacccaagtgggaggacaacgtgtacatgtatttgtactttgtcatcttcatcatttttggaggcttcttcacactgaatctctttgttggggtcataattgacaacttcaatcaacagaaaaaaaagataagtggtgctcaggagtttctggtttctgctgtagtggtaagccttatatttcctgttccctgcccagctctggcctcctgacaaaagccaacactactcacagcccatcactttaatatcagtgctaacccttgccctgtgattgctgttgcaggaagagttgcatttctctctgtcagcaatgccccactaacatcctcactcaggattcacatctcaaagggatcttggtcttcccaactggaaccaggtgtgttagatgtgttccaagtgagccctgggagaatacaagcagggaaagaaagggatctagaacttgctgacctgttgggggatatgatccccacaaaggactgagtcagggcacctcaggaaaggccatggcccagcactggcagaatcccaaccctccttgggatggggaggaaggcttgtgcctccaagggtgccgactctgattaataggaatcgaatcccagataacctctcatgtttataagaaaatgtcagggcaataaaggtataaagtattttcctattatcctttcatttaatgccttccatacccctgaggtagataggcgctgttctagatttgcgtaactgagatcccgagagaaaaggggctacatggataagtcacagagtacatgcaaacctgggtttgcattcctgactcaactacttgtggatggctcatgctggcaatattttaaacccctctgagtctcagttttctcattcattcaatggggctaataatacctactctctggattgtggtgaggggtaaacaaaatcctgaacaaagatcactgagcataagacaactttggtggtgcagtttctggcactgtaacagcagaggggagtgtgactggcagcgcctcaagagcaccagatgctgttgctattaacaatttaaaatatatacctactagggcaggcattccacttacaggaaatccttgcccagggttctgagcataagaagaggacaggataggtctgggacaagacagtgctatttagtaccctggggaggtttgagattattgaagcaatcatttctctcattttacagatgagaaaactgaggtcaagaaacagattacagagggagatattaggtaacggaaggagatgagctagtgaccaggctggggtcactgagaaactgcatctactgaatccttggtcagagttctcagcatgacctcacctggagctcacctacccactgcccttgccctttccttctctccccccataaagatggtcctcccaggaagccctttgtgtccacagatcttctcagatctcctttcaaattccacagatctcagcccagtttcccagcatttgcagggactaacttacataaacatgttattaaaataggtggctttcaaattatgtcaggaagctaaaggtgagagtttgaatgaagaaaatccaaagggcccctaaagaaaaactaatacccaatcctaagggaggaaaacatcttcgttggtgcagtttctggcactgtaacagcagagggcagtgtgactggcagggcctcaagagaaccagaggtccctctgagaccaaggacccaaggataaggcagtaattgtcctcatctcctcctctccagaaaagatttgagggcttctgtccctcccagagtctttgcttcaaggtcctcaggaaatctcttgccccctgggagggactgtgactctagaagcccaaagaattttactggaatgaacaggctagatccaaggctcagatttgaaccaacatgtaccttctccttgagtcctgtttaccaaccctccccaccctttatccagcatctctggatccctggagaacagaaactggctttgctttagagacccaggcagggagtcagcaatggaactcagtcccaccgttccgacactggatgtggcaagacactccttgatgctgggcttggtttgtctatctgcagaggaggggagaaggttgatatgatcctttctctcctgcctgttctgattttggtatccgtagggggttcctcttgctttagtaacagtgtggccctctctgcacttagggggccaggacatcttcatgacagaggagcagaagaaatactacaatgccatgaagaagttgggctccaagaagccccagaagcccatcccacggcccctggtgagccccagaggtttcctctagcacagcctgtctgtgaatccaacatgacagtctatgcctgtgtcaggcaggggcctgagggagtgctgtttatggaagagaagatctgggttgacgttgggatgagggtgatgagggttcctaggcccaaggaatgagaagttcaaaagaagcaactctggtcttctggagtaaacataccttttacagctatttgaaatgaatctgttgggggaagcactgagtttctccaacagttttagagttcaagtacaggattggaggcaggttaagctaagtgacagtaagggtagttagaacccagggattaaacttgtgtggttatgtatcatggtctaggtcgcagtagatctccagtatcaccctatattctaccccacgcctacaggtatagagaggaaatgacaacaacccaactcccctgtcaggatccaagatgcagtcatggtagtggtcaagtggcccagtaggaaccaaaagttatcccactcgagtttaaagattgggcaaaaattagggccagactctagtttcactccttttttcataaagatctcaagagacatggctttgcgttcctccattaaatgtactacccataccacacatgatatcacctaagttcttctcagtcttctgccagaagatagaaaacatcaagcctctgagaggccctaagatagcacttttttgggaatggatgaacaggtttgggggtgaagatgttgatgtgtcagaaattattgttgatcgtcttcaaagaatttctgagccatccactccagtgaatggaattggccctgtgtccttctacataaactttctgtggctaagatgcagcattagtgaagaaaatcacaggtattgctgatgacacaatttcattagcccttccccacacaagggaaaagtccaaaggacatttaacaaaggaacaagcctttccctaaatgaattatggagacatgcattctgttagccaagctattagatttttttaaatcaaggtataggatttgcataatttacttcaaactttgtcagaacaaagtgaaaaacatttacaagagaaaaaagtgatgacttttgacactgtattttgaaatagtggtcatgaatttattactagtctagattctgataagaagtattacaatggggagtggggagtgataggaggttcagacctctgtaggggcacagctttcttcctaaatcacccatacaatcaagataactggatttgagtgaacctgagcaaaagtccttaggctcattgagtatccctccatcaacaagttcagtggagaggagcaggctcaaaattaaaattaggtgaaaggctgagtcccaaccacattcaagtcatgggtaatgagaggaggaccctaagacttactgagaagcaagcagctgagtccacactggcctttacttgtggctggagtaagattgaatccacatttgagccagatgccaaggaggtgtgtgctagggacaacccttggcaaaaacatgaaagtttttggcaccttcccccacatactactcaatctctctttgacatcccagcttcttccctgtcatcacccaaccccataggctgccaaagaaagcttcctcccctcaaggaagacaacattcttaggacaagataaatcatatttcaaaaagggaccctggagagggcatctacctacaaaggcatgaccctaatgttgaaattccaggcagtaaataggagtgggagacggagttgatggtcaggcaggaagacctgcaacaaaatcaccatttctcctaattaagctgcaactaagatcctccgaggatggcacagggggagacctccacatgtggaggggaagtgaaacctcataaccaattctgttcctgagattctccatcctttgaatggaagaagagtggattagtaattcactctcaaccttttgctagccttagtggaggaacgtggctctccccttaatattctggcccaagcaaggtaaacactctttcctttgttccctaatttcgcatagctgaggcaaggctagaacatttaaacaaaactttgaagtggcagggatgccaacagagaaatcagcacaaagcagagtccaagcagcacctgcagatggctgcactccaggacccataggtcttggaccatcctagctcctgaccagcatccaaatggcaggcaacatctttgacacccacatgcccagtggcacaagccggatcatcttccctcttcaaagtctagaaccaagaaagaaatccaaggcaaaaggaaattcccactcccaactaagacccttcttcccaggcccagcttgcttttggccagattattggccctggaatgtccaccttctccccttaggagccccaaaggtcaagctggtcataccagcaaagcactgacacaggatttctgccccatcagtgcatgggtgccatttcatgacagagcttacctgggaccacataggagcctcacacacctcctctcacctctgatgatgctcaggctctaaatcttgtttcttccataggaaaagttaaggattccacaagactgggaaattttattctttaacattccctgctacagaaatcaataaaagcagctctcacatactccactttatagaaatataataggctctagagaatatcacataatcaatcacccacttcatcgtctctgagagcaccaagggttgcaaaggtatgatccctgaccgtgggctaatccaagagcagctagcaagctactccattccctaaagtcagaatatccagggcaaacttcacacccagccacttaacgatgccgttgcctgctctgtttaattagaagtcatgtgaccatgaatgggcctgtattttttcaccattttcagtgatgaaatggaagggattagtggctcagcaatccccctcctgccccaggaaagatgtgagccagcagttctgccatgagcaaaggccactttggtctgattctttgctctaacccaacaggatagcaacccatccccaccatgaagcagaaggcaaggatcagcctcatcacagcacttccccctctgcttgctgtgcagctcccgtgggctccctggaagggatcagacaggttcttctcttcctccctcatagccactcatgcagaggcttgcacatcccatacattcagtatgtacccttggtacagaattgaatttagtcaaataaagggtgactttaaattttcatttgagctatggttaactcagagctgcccattctgtcttccattcatttacaaatttgcagagcatctgttgcagccaggcactatgcagacaccagggttagagcagtgagcaagacagacaaagttcctactcttacagtttacagtccagtgacagaggcaaacagttggccaaaagttgcacatatatgttaattcctggctggataaattgtcaagggagaaaaaatggggtgaagagcaaaggatgctcaagactgagcctcgaagaactctgatgtctaaaagttgggtaaaggagactataaaagagcatcacaaatggcaagaaaagaagcagaaatgtaaggcatggtggagaccaagaaagcaacatttcaaggtagaagggtactaggcaatatcagacaagcgtccttggatctaatattatgggaagtcattcatgatcttagtgagaacaatctctgtcaggatagaggcaaaagctctgttgatgtgggctgaggagtgaatgagggacactgattgtacacaactctttcaagaaattttgctttgaaggtgggaagagatctaagatggtagctggagggagatgtaagtttctgaaatattctgctttaagttaggagaaactaggtcattagagatttgtgcaataaaccaagagacaaagagtaatgcacatggacattaatgttgcctaggataatagccaagagtgggcaaatatggccaagagcctcacccatcattactgaggcagagggaccaagagtttggcaagcggcagtaatgaagaagtgacaaaactaggtggcaaagcttcaaagcaagaaggggttttacaagacacaggaagagcagtggtgtggaagggtcagtggtgaacaaggagaacgccaggcctaacccctgaggtacatggggtaggggagaatggcagcctttgaatagggggagatatgtgcagatcaaggcaggtgagctccatagaggtcaggagaagttttgggagaaggtcaaagcgtggggaatggggttgggatcaaggactcacagagcagtaagatgttcacagcactaaaagaagagaagatcacagtaggagctttttaaagacaccataaaaataaccagatataaatgatctcttggttatccaggccactctgcctccttccaagatgcaaacaaccaagacttgaccctacgccctatacctgcatttgcttaggcatttgcacagcaccaggaacagagggaacatttccaagaataagtttcccctttgcacttgactttactctcagcaaagtagctcaaattaatatttcaagcagctcttgaactcttgcaatgtgcagggcactgcagggaaacaaagttaaggaaggtatagcccttgtcctcaaacagctcattgtctagtagagaagacgcatatacaaaatgctagaactcgaggctgactgaaaagtgggatccccaaagggacagggtagtgtgttgtcacgtgactaagggacactccatgcagtaagtggagcttaaaagagatggattactcaagactgttggaatttagacagccaagagaggagataggagggcattgtgaatagaggcaagggcacagaccaggacaaaagaagggcctggtggcatcaaagggccaggagaggtattaaggacttgaactggggcaatgaggtagagtcaactaaaagtgaaattttggaagaggtaaggatagtatttcgcttctgttaagatgtggagtgtgatggagacaaaactcatctacagataacacagatgcctggtttgtgctggcccaaaggccctgatgccactatctcttgttttctcagaacaagttccagggttttgtctttgacatcgtgaccagacaagcttttgacatcaccatcatggtcctcatctgcctcaacatgatcaccatgatggtggagactgatgaccaaagtgaagaaaagacgaaaattctgggcaaaatcaaccagttctttgtggccgtcttcacaggcgaatgtgtcatgaagatgttcgctttgaggcagtactacttcacaaatggctggaatgtgtttgacttcattgtggtggttctctccattgcgagtaagtgggcagccacgtggtggggaagccccacctctgtttgggggtctttgggatgctcttctaaaaccaaggaaataaccaaccaactttttgaaatacgtgtttatgttagaagaaccctgtatttgcagctttccaagagtagcaagttttaaatgccttgggctgctctctcagtgaaatgaagaggttctcttggccttctccatgctcacacgaagtgttttcaggcacctactgtgtgcacagcccatggctagaacctcaggggctgacagggaataatcactcctcctgagaacctcagaccgtaagatgatggagtctccagcagaccttacttttatggtcttgaaagcagggggcaggtggtgtaatgtgagatgagtcttaaaatctgttctggaaaaggagatggattgccatcaaagtgaggaaagactgggaggagattgttcaaaggagattctcaagtctagggtctggaattaaatctctacacaactgttctattagggaacatgagtgatagaaaagtcaagatatcaatgccaagaaattaatactgttaaggcccagtctgggtgttgttgaatgacaggcccagtattttgggtccagtggtgttcagagaaaattactagagttagaggctaacatggggaaatggagctgccttgactgaatacttcctaagttctgagcactgagctgggctccatgaatgttcacagcagccctgtcaagcaggtgttattatccttattttatacatttaaaattgagactcagagatcaagaatattatgcagggtcacagagtttccaagggttgaagctgagtttagaacaggctccaatcttctaatgaacttgctgcctgtcaccaacagccaagagactgtccctgggcttatgggttagctgaagtttgaccctataaaggccaaatcatgctcaccagcttcacctggcattataaatgtatcttgattggttatatcctgacctgcttacttttcatgtcggggtgtagctgtagatttaatttgccactgatttagtaacaagagctgagagtatctaaatacaacttaacagcatttcatcaacctccccaccttggtgctgaaacacagccttgggttgcgtgtatttccggggatttcagtttgtttttgttcttgttttattttgatattgctgctctgttttttaacactttattgaggtatgatccacatgtaaaaagctatacatgtttaatgtacacaactttatgagtttggagataagtatacacccatgaaaccatcaccaccatcaatgccagaaacatgtccataacctccaaatatttcctcctgcctatttatttatttattgggtgctaggaacacttaagatttattctcttggcaaatttttaggtagacaacacggtattgctaactatagggactatgctataagtagagctctaggatttattcatgtcacataactggaagtttgtacactttgacaagtacctccccaatttcccctcctcccagctcctggaaaccaccattctattctctgctcccatgagtttgactattttagattccttatataaatgcaatcatgtcgtttttgtccttctgtgtctggcttatctcacttagcataataggagtttttgttggttggttggttagttgttttcatttttgttttgttttgtttgtcttccaaaatgaaagattccaaaggctattttgattttatattaaagaagggagcttgtttgtgtatcagtaatatagaaataaaacatagccaagtacttagttctatgatggggatatcttaactaccagttcctgtggcttacagggtagcaccatccgctggggcaggaatcccttatagagctggaaaataagcagaaaaaacccacatatcaatctttctaccctctctccttacctccctttcttctttcccaccaacaagaggtgattgagtatctaattgttacaagtacgaggaaccattctcccttaaaataagatcctggagcaaattaaaatgtgctgtagaccagttgtctggcagaaaattttaccagagtatgtagacaaataatgtaccctacacgatgggaacatgtcctagttaaactggaaattcacagaaggtcttccacaaagattttataatccaaaattataattatttcccaagtccccttctactttcttcctctttccaacacaatattgtgacccatgtgcataacaacaaagagcaagtaggggagagggcccagggaacctggcaaggagcgagagcttgctgctacatccctcaccatttttcctgtgagatgttgaaccctctcttacctaaaggccttgcctcatctttggtggaggcctttggtacaaataaggctccccaggtccccaagaccaaaaatcaaacatcttcaagttagacatcatatagagggacatatacattctttatatttccaactttgttcatagttggagttgggggcagtaactgactcccccaaaaaaacctatctccaggccctaacataaagttcaaaaacagctggaaccgaaaaaaaaaaaaaaaaaacaaattaaggcattgtgcagacagctggtcattcaaatcccttatgctttagctgtcagccagttgcccgaatcctcaggcccccttgtaattaacaccaggctccgtacaattagccacaggaccgggtgccagaaacagagtcaatcttcacagtaggaggtagggagaggaatcataaggggtcctggccttcacagagcacaggaccagggtggaggaaagggcatgacccaaaggctgcagtatcagggaggagcagggtctgtgtcataggaaaaaacaggccaaagactgtgagcctgtggaataaactgcagtcacttccagctgaacttggctgcagaagataagtttttgactgtggaggttgaccaagaggatattctaggcggaggcaaagataacatggtaggaagggtaagacggaggaggaagagaggacttatgcaatgggcatttactgagcccctactttgtgctacctaccatgccaggctctgagggcccagagtcctcaaatgtggatgcccaagtggcagtctataccaagcaaagcagagtgtcatcacagccaactttgtcacgtctcatggctggagatactaattagataatttcttccttcttttaaaggcctgattttttctgcaattcttaagtcacttcaaagttacttctccccaacgctcttcagagtcatccgcctggcccgaattggccgcatcctcagactgatccgagcggccaaggggatccgcacactgctctttgccctcatgatgtccctgcctgccctcttcaacatcgggctgttgctattccttgtcatgttcatctactctatcttcggtatgtccagctttccccatgtgaggtgggaggctggcatcgacgacatgttcaacttccagaccttcgccaacagcatgctgtgcctcttccagattaccacgtcggccggctgggatggcctcctcagccccatcctcaacacagggcccccctactgtgaccccaatctgcccaacagcaatggcaccagaggggactgtgggagcccagccgtaggcatcatcttcttcaccacctacatcatcatctccttcctcatcgtggtcaacatgtacattgcagtgattctggagaacttcaatgtggccacggaggagagcactgagcccctgagtgaggacgactttgacatgttctatgagacctgggagaagtttgacccagaggccactcagtttattaccttttctgctctctcggactttgcagacactctctctggtcccctgagaatcccaaaacccaatcgaaatatactgatccagatggacctgcctttggtccctggagataagatccactgcttggacatcctttttgctttcaccaagaatgtcctaggagaatccggggagttggattctctgaaggcaaatatggaggagaagtttatggcaactaatctttcaaaatcatcctatgaaccaatagcaaccactctccgatggaagcaagaagacatttcagccactgtcattcaaaaggcctatcggagctatgtgctgcaccgctccatggcactctctaacaccccatgtgtgcccagagctgaggaggaggctgcatcactcccagatgaaggttttgttgcattcacagcaaatgaaaattgtgtactcccagacaaatctgaaactgcttctgccacatcattcccaccgtcctatgagagtgtcactagaggccttagtgatagagtcaacatgaggacatctagctcaatacaaaatgaagatgaagccaccagtatggagctgattgcccctgggccctagtga

SEQ ID NO: 673 - DNA, 206177 bp, Homo sapiens
ggttagtggcggggctgaaggtaaacaggctgttgtgtttcctcggtgctgttagttgctgtgtggccggtagccatgtgatgaggtagatgcacctaaaaacaaaaccactgtgcaagtataatgctgatggggagagagccacttttcagggctgagggagcaacacgaattcacttgtgtggtcctagaccctggcttgcgctcttttccgcgccctccccgagaggcccaagcaaaacgaaagcactgaaagaattaacagtgctagacatggcgctggaccatctcctgacctttcctaggcaggcaggagaaccaagtgaaccaagtgatttactgttaagtacctaaaaatgcggagaattatgtcgtggcctcaaagggggagagatagaagtccttgcaaaggaggtggcctccatcttcagggggagcaaagaatccgtttaaattaaaaggataaaaagtggggccataaaagaacgagatcatgtcctttgtagggacatgatggagctggaggcccttatccttaagcaaactaacaaaggaacagaaaaccaaataccgcacgttctcacttataagtgggagctaaatgatgagaacacatggacacaaaagagggggacaacacacactggggcctttcggagggtggagggtgggaggagggcgaggatcaggaaaaataactaatgggtactaggcttaatacctgggtgacaaaatagcctgtacaacaaacacccgtgacacaagtttacctatataacaaacctgcacttgtacccctgaacttaaaagtttaaaaaaaaaaaacaagacaaaaagatgttataggaaggcgaaaacggtacaccagctaaaattgttcccagagacaattctagtttaaatcatctcttatactggaacagttaggtttgacttaaggtggttttcctgaccactaattataagagctgagggtgatcagaccctctctagtgaaagtgaatcctatagaactacactgtgggatatagcatatgatgtatctgctagtcatttgtggctcttgagcacttgaaatatagctagttccagttgagatatgtaattgtaaactacccccaaatttcaaagactagtttgaagaaaagaatgtaaaatatctcattaataattttttgtattgatttcatgttgaaatgatgtttgggggtatattaggctaaataaaatttattaattttgtcatggatattagaatatttaaaattacatatgtggtcacaaatttctgttgcatagtgctagtatataagtaatgcttagaaaagttgtcttgacaaatacttcttaaattaataaagaaatgtgaattagatgagtaaaaattgtgatggcagaaagcttcttaagcaaaactggcagtgataacttataggtaaattactgcatcattacaggcttattcattcactgattcatgtattcattcatttaacaaaatattatttagcatatcatatatgccaggcactatattaggtgttggggaatcagtggtgagtgcacatagtcatagaacttagagtcccaggatgagacaggaattaatacagagataagtactatgaagaaagatgattgtaagacaggaagtatcttgagtcaagagttaactaggcaaggagagggaacagtctgagcaaaggtcttgtagcaggagagagcatggaacattacaggaactgagagtcaaggcttagagtacagagaagtgaaaggagtatgcagaggccatacccagcaggatcttttagaccaatgggaagctgttgaaatacaggtagggaaataatatgtctgtattttaaaaattgcttaagtgtctattgagcacctatgatgtgcaaaatacaatacaggtatgttgctctggacaatatactggtacttgctagaaattgatatgttgtagtcctgctttggacctgaaaaatattgaaatagtgaagttctttcagtgggcagaattttcaccagtatgttttgatgttcagtttggctgaaaggagaaatggtcaattcagggtcagaggataattttttggccagtttgtgaaggacatggaaagagcaagactggagaactagtgacaaggaagactccagaagggatatagtgatggacctctcagaataaatcttaagaatcatatggatgaaatgaactgctttgtgatgaaactcagcctcactgcctgctcagtagaatcatgaaataaatggcaatggcaatggcaacaggattggagctatgcatgggatcaccaagccaccgctgggtgttcagaagcagtgaccaataccccatgctctgggagggtcagccagtcacatgtaggcaagtctattccattggtcattggccctccccatcattgagggagttcttatttgtcctctctaaaatatgtttattctagattgagatttgctttccctgctcactgtacttccgctgacaccaccatctagggaattactcagtgctttagacactatcattttctctaacactatattgcttttgaccaagaaattcactctgcaatgaaagaagtaatgcaatgggctattgcccatggaatttattggtctaattgtgtactcaatcactgagaagtatcttgtcttattgaagatatattgaagacttagctatggtgccttctgggagataaccctttttgatactgtcctgtaggatgcagtatatgctctgaactactgtccaatattcagcactcttttttcctgttccttttatctattgctgtttaaccatctgcaaaatgcaatggtttaaaacaattacaacccttactttacttacaaatctgtaatttatgcagagcttcatgggaacagattgtctctgttccactatccacttcacatcagctggggcagctaaaagattggggctggaatcatctgaagaccccttctctcacatgtctggtgactgatactggtgttggcctagtccttagccaaagctgtggctagaacaccttctcatgatctttccacagcactatttggttcctcacaatatgctaactgggttccaaggatgagcatcccgaagaagaaaaatctggttgaaagctataatgctttttctaaactcacagtggaagtcatgcagtgtcactttaagccatagtcaattcattagaacttagttactaaggccatcagtgtctaaggagaggggattagatgactcctttttttatgaagtatcaataaatttgtggatgtattttttaattgacacataataattgtacatatatatggggtacagtgtgatattttgatacctgtatacaatctgtaataattgctttgggaaaattcaatatccactcttttagctatttgaaaatatggaataaattattgttaatcatagtcatcctacagtgatatagaacaccaaaaattattccttctacctagctgtaattttatatgtgttaaccaacctctctatatataatcctctcctttacccttctcagccactagttaccactattctgttctctacttctctgagatcaacttatttctctttcacatattggtgagaacatgcagtatttatctttctgtgcctggcttatttcacttaagataatgacctccggtgctatccatgttgctgcaaatgacataattttattcttttttatgattgaatagtatttcattgcatatatgtaccacattttctttatccattcttcttttgatggacacttaggttaactccgtatcttggccactgtgaatagtgctgcagtaactgtgggaggacaggtatctctttgacatactgatttcctgttctttgggtagtagtgggattgctggatcatatggtagttgtagttttagttctttgagaaatctacacactgttttccataatggttgaactaatttacattcctatcaacagtgtatgaattcccttttctctgcatcctcaccctctgcatttgtttttgtctttttcgtatagcgattctaactggagtgagataatatctcactgtggttttgatttgtatttccctgatgattagtgatgttgagcatttttttcatgtatttgttggctatttatatgtcttcttttgaaaaatgtgtattcagatcatttgcccatttaaaaattatttgggttttttttgctattgagttgtttgagttttttatacttcctggatattaattccttgttggatgaatactttgcaaatattttctctcattctgtaggctgtctcattcctctattgattgtttccttttctgtgcagaagctttttagtttgatgtaatccaatttgtctatatttggttttgttgcctgtgcttttgagggcttatccataaaatctttgcccaggccaatgtcctgaagcatttctcctgtattatcttttagtagtttcatagttttgggttttatatttaggtttttaatccatttcgtgttgatttttgtatagggtgagacgtagggagtctagtttctttccttttcatatagggggtcagttttcccagcaccatttattgaacaggctgttcttttcccaatatgttatagggcctttgttaaaaatcagttaattgccaggcatggtggtacatgcctgtagtcccagctacttggaaggctgatatatgaggattgcttaagcccaggagtttgaggcctgcagtatactacaattgtgaatagtcactgcactccagcctgggaaacatagcaagacccagtcttaaaaaaaaaaaagggggtgggggtgggggtggggggatgggggtgggggtggggggtggggggctgtgtgcaatggctcacacctataatcccagcactctgggaggctgaggtgtgtggatcgcttgagcccaggaattcaagaccaaacagggcaacgtggcaaaaccagtctttatcaaaaaatacaaaaattaaccgggcatggtggtgcatgcctgtagtcctagctactcaagaggctaaagtgggaggattgcttgagcctaggaggttgaggctgcagtgagcagagatcacatcattgcacttcagtctgggtgacagagcaagaccctgtttcaaaaaaaccattagttggctataaatacatggatttatttctgggttctctattctgttccattggttgatgtgtcttttttaatgccagtactatgctgttttgtttagtgtagctttgtatggtatattttgaggttagtgtgatgcctccaattttgttctttttgctcaggattgctttggctatttggggtcgtttgtagttccatatgaattttaggattattttttctatttctatgaagaatgtcattggtattttgatagggattccatttaatctgtagatcactttgggtagtttggtcattttaacaatattaattcagtatatgaacatggatgtctttccatttttgtgtatgtcctcttcaatttatttcatcagagttttataatttccttcattccctccctccctccctccctcccttcctccctcccttccttccttccttgcttctgtcctttctttttgagacagagtctcactctgttgcccaggctggagtgcagtggcctgatctcggctcactgcaacctccacctcccagattcaagtgattctcatgccccagcttcctgagtagctgagattacaggcccgtgccaccacgcccagctaatttttgtatttttagtacagacagggttttgccctgttggccaggctgatcttgaactcttggcctcaagtgttcctcctgcttaggccccccaaagtgttgggattacaggagtgagacactgtgcctggccgctactgttttgtatattgattttatatcctacaactttatgaatttctttatcagttctgagaattttttgatgaagtctttaagttttctatatataagatcatatcatctgcaaacagtgacaatttgacacttcctttccagcttagatgccctttattctttaatcttgcctaaatgctctagctagcattctccatactatgttgaataagagtggtgaaagtgggtatctttgtcttgttccagtttttagaggaagagttttcaattttctcctgtttaagatgatactagctgtgggtttgtcatatatggcctttattgtgttgaggtatgttctttttatacttcctttgttgagagtttttatcatgaaaggatgttgaattttatcgaatgccttttctgcattgattaagatgatcgtttggtttttgtccttgattctgctgatgtgatgtatcttttgtttattgatttgcatatgttgaatcatccttgcatccctgaaataaatctacttgatcatcatgtgtaatccttttgatgtgttgttggatctggtttgctaatattttgttgagaatttttatatctatgttcatcagggatattgacctgtagctttctttttttgttgtgtttttgcctggttttggcattagggtagtgttggggttgtagaatgagtttggaagaattccctccccttcaattttttggaataatttgagaggaattggtgttagttatttaaatgcctggtgcaactcagcattgaagccatggtcctaggcttttctttgttgggagactttttatttctcccacaatctcattacttgttattgatttgttcaggttttctatttcttcccgatccaattttggtaggttgcgtgtgtccaggaattcatttcctctaggcttttcatcttgttggcatatagttgttcataatagtctctaatgatcttttgtattcctgtggtaacagttgttttttttcatttctgattttatttatttgggttgttgctctctttttttaaaattactctagctagtggtttgtggatattatcttttcaaaaaactttttgttttgttgatttgtattttttgtctcgatttcattatttctgctctaatctttattatttctttccttatgctaattttgagtttcgttggttcttgtttttgtagttccttgacgtgcatcattagtttgtttatttgtaatctttctgctttttttgatgtaggcatttattgttataaacattcctcttagtaatgcttttgatgtgtcccattggttttggtatgttgtgtttctgttttcatttgtttcaattaatttttaaatgtccttcttaatttcttcattgacatatttatcattcaggagcatgttatttaatttatatgtatttgcacagtttcgaagtttctgttattattgatttctagttttatttcattgtagtcagaaaagatacttgatatggttttgattttaaaaaatgtgttgagacttgttttgagggctaacatatggtctatcttggaggatgttctataagctgatgaaaagaatgtgtattctgcagctgttagaaaaaatgttctgtaaatgtctgttaggtccatttggtctatattgccgtttaaatctgatgtttcttggttgattttctgtctacattatctggtcaaaggtattgaaatccccaacttaattgtattggagtctgtcttccctttagatctaatgatatttgctttatatatctgggtgtatatatatttaaaattgttacacccttttactgaattgatccctttattattatataatgacattctttttctctttttacagtctttgacttaaagtaaaaaactcttgcttgtttttggtttctgtttgcgtttacatttggcatttaaaaaattatttttatctttaactttcgtgggtacatagtaggtgtattcatttatgggatatatgagatcttttgggacaggcaggcaatgcatggtaatcacatcatggaaaattgggtatccatctcctcaagcatttatccttctttttttgcatttatcctttttattacaagcaatgtaattatactttttaaattatttttaaatgtacaattaaagtattattgactgtagtccccctgttgtgctatgaaatactgtcttatttattctttctaattttttttgtactcatcagccatctccacctccccaccacccacccccaactacccttcccagtttctggtaaccattcttctattctctgtatccatgagttcagttgctttgatttttagatcccacaaataagtgggaacatgtgatgtttgctttctgtgcctggcttatttcgcttaatataatgacctccagttccacctatgttgttgcaaatgacaggattctgggtttttttttttttttttggctgtatagtacttcattgtgtataagtatcacattttctttatccattcatctgttgatggacacttaggttgcttccaaatcttggctattgtgaacagcgctgcaacaaacatgggagtgcaaatgtctctttgatatactgatttcatttcttttgggtgtatacccagcaatgggattgctggatcgtatggtagccctatttttagttttttgagactgctaaatgattcttcataatggttgtacaaatgtgccttcttaccaacagtatacgagggttctcctttctccacatcctcgccaacatttgttattgtctgacttttggataaaagccattttaactggggtgagataatatctcattgtagttttgatttgcatttctctgataattaatgatgttgagcactttttcacatgcctgtttgccatttgtacgtcttgttttgagaaatgtctagtcagatcttttgctcatttcttttttctttttcttttttttttttttttttttttgagatggagtttcgctcttgttgcccaggctagagtgcaatggcatgatctcggctcactgcgaactctgccttctgggttcaagtgattctcctgcctcagcctcccgagtagttgggattacaggtatgcgccaccaagcctgaataattttgtatttttagtagagacagggtttctccatgttggccaggctggtgtcgaactcctgacttcaggtgatcctcctgtctcggcctcccaaagtgctgggattacaggcgtgagccactgcacctggaccttttgctcatttcttgatcagattattagattttttttccctatagaagtgtttaagctccttatatgttctggttattaacttcttattaggtggatagtttgctaatattttctcccattctgtgtgttgtctcttcaccttgatgattttttcctttgctgtgcggaatcttgatgtgatcccatttgttcatttttgctttggttgcttgtgcttgtgaggtattactcaagaaatttttgcccagattaatgtcctggagtgttttcccaatgtttttcttgtagaaatttcattgggatttcttttttatattttttcactttcagtctatgtgtgtctttacaagtgaagtgagtttcttataggcagaataggctcttggtttgtttgggtttttttggagatggagtcttgctctgtctctcaggctggagtgcagtggcacaatcttggctcactgcagcctctacctgctgggttcaagcgatattcctgccttggcctcctgagtacctgggactacaggcgcctaccaccacgcccagataatttttatatttttggtggggacagggtttcaccatgttggccaggcttgtctcaaactcctgactttaagtgatcctcctgcctcagcctcccaaagtgctgggattacaggcatgagccactgtgccggcctgggtcttgtttttttaatccattcagccagtctatattgtttaattgggaaatttaatccatttacattcaaggttattattgaaatatgatattttttctgtcatattgttaattgttttctagttgttttgaaattctttgttcttttctttctctaatttatctttgcagtgataaagtttatttttctttctcatttgtgtatcttttcaatcagttagttttgtacttttgtgttttcatgatggtggttatcatccttttgcttccagatgtaggactcccttaagtatttcttgtaaggatggtctagggtgatgaatttcctcagttttagtttggggaaaattttatttcttcctcatttctgaagggcagttttattgggtttgatattcttgcttggcagtttttttcttacagcactttgaatatatcatcccattctctcccggcctgtaaggtttctgctgagaaaaatgctgttagtctaatggggattttcatatatgtgacttgacatttttttcttgctgttttaaaaattctctctttgtctttgacttttgacaatttgattataatgtgcttcagagaggacttttttgggttgactatatttgaagattttttagcttcctggatgtcaatgtccatatgtctccaaagtcttagaagggtttcagtgattatttcatcaaataggttttctattcctttttcatctcatttccttcttaaacattcagaatgtgaatatttgtttgcttaatgatgtcctgtaagtactgtaggctttctttattctttttgaattcttttttctttttttagtctgactgggttatttcaaaagacctgtctccaagttcagaaattattttccttttgtttttcttttttgagacagagtcttgctctttcgcccaggccggagtgcagtggcgctatctcagctcactgcaagcttctcctcccgggttcacaccattctcctgcctcagcctcccgagtagctgggactacaggcacccgccaccatgcctggctaattttttttttgtatttttagtagagatggggtttcaccgtgttagtcaggatggtctcgatctcctgacctcatgatccgcccacctcggcctcccaaagtgctgggattacaggcgtgagccaccatgcccggccttcagaaattattttcttcttgatctagtctgttattgaagctctctattgtattttttatttcattagcagaatcttttagcttcaagatttctgtttggttcttttaaaaaaataatatatgtttctttgttgaatttctcattcagagcattaatgttttcctgatttcatttgtatgtctgtatttatcctgtatcttgctgaggttccttaggctcattagtttcaattcctttttaggcatctgatagctttcattttggggaatgtgttactggagaattattgtgttcctttggcagtgtcgtgtttccttgttttcttatgtttcttgtgttcctatgttgatttctgtgcatctggtaaaatagtcacctcttccaatttcatggagtagctttcattgggaaagacttttttcctgtagttgtgacctgtagtgttgattgcataaggtgctttggctttggttctgagtgggtgcagtagtataatctccacactcgatcttagacaaaaggctgagaagcaataacagttatgtagtctctgtgtgatttttaacagcatgagcagtatttgagtgccacagtggcatagactgttgacatttatggaggctatagtgtagttttgctggtggtaagtgtccattggtggccagttcttggattatgggagggtgcttgcctggaacaacagctttactgattataggatgccattgccagctgtggtgggcaccaggtgggcaccagccctgaggaacacagcacgtgatgtctctacctctagagggggtggggttagcagaggtggtgtgtgctaggtagaccagtcctcagcccttggcggacatgtacacatgctatatctccatcactggatggggcagggttgctggcagcagtgggtgctaagtgggcaggtccttggtccctgggaactgtttcaggtacatggtagctctgccactggagggggcagggtctccagtggtgacagcctctaggtgggctgatctttggtctctaggggtgcccatgcataaggcagcctcatcactggaggggatagggttgctggcagcggtgggtaccaggtggctggccaggcacattggcttcctcactcctgagggtgacctccttactgtgctggactacctgcttcctggagcacagagtgctatgtgggctttagtgctagagtcatggctctactgctaggtctggctgggatactggcactcagtcttctgtatgggcatggtggaatgaccgcagggccccagggatattggagacatagggccattggatcctggggcaggatgtacttcagcagtggcttctttcccaaaatggtaccatgccgtgacagcttaggtcccagggagtctgcaggagagggttcattgtgtgtttgtggatgtattttaaaaccatcacactgccataggcaaaataaatagattcagaaacaaagggatattatacctaatgacccacttaaaacaattttttagacttccattctctgaaattctgggcttcggtggttttagaggtttgtttctaaagaaaggagttcctccagcaagggctaaacaatgatttctttgatttggagctgagactgccatctgaccattttccatgtcatctatcattggataagcaagagaagaagaaggtgaaagagaggaagaaggttatggtattgattgatgttattaaacttatcatcaagcaaaaaaaatagttctgctggtatatctttaaacagatagatctaccaaatgcttggatcccttagaaatgaaggtattggctgaaagtaaaaggaacatggaatcgctagtagagaaaggaagtcataaatggagggaaggccttatgatcaggggaagaaatgagagttgtcatcttgtttatgtattttttaatgtttcatgtattcttttatgtgttttcacttttctttagcctttatacttcactattgtatgtagggtgtgatactgttgtaaacttcattatttagtccataagtatcagaatgtggatacgaaatcagtacagaacttgaagaagaatggccaccaactagacttggtgatggatggttctagacttggaattgggttgatggatgtggtaactgatgacacattggattgacttccttggagagtgacagtgtgagtgcatctttgattgtataaaggaaaattgcaatattttaagtggcaacacttttttgaaatgtaaacattggaagcaatggttatattggtgttgggcaaccaaagggatgactttgtgtttgacatttttgtggttttattttctgctgtttatcatctgagccctctttctatgtgtgtggaattcctcactgtatgtgtcttggttgtggtgagcaatactcccactatagaaaatgaggatagttactcacttctatagttaaagtatgttcatgtaacctcagcttgactaatcagataacatcttgactgcaacctcatgaaactctgagctacaaccaaccacctaaactgctcctgaattcctgaactacagaaactgtgtgaaacaataaatgtttattattgttttaagtggctaagttgtgggataatttgcattgcaacaaaagataactaatacaccttctcttcctcatggggagtggaaatgtcacagcgccttcacagctctcacaaagatattcttaccatcaccctcttcaatctaccatttaattctttgccttctcttacaaaattgctaggaggcttgtcctggcagaattcctttaacaatctttttagcattttctttatgaaaagattggtttcgttattcaaaatgtaagaagccttgacacctattacattgttttcagcttttaagacttctgccaaaactcctagataatatgaaaggtttaacatccttctttattttcggctcccattctcatttctatcccccattataagtacagtcatccctcaatatctatgggggatttgttccaggacctcctctgataccaaaatccaagtatactctagtctctgatataaaatgggatagtgtttgcatataacctaagcacatcctcctgtacagtttaattttttttatttttaattttataggtatatagtagatgtatatatatttatgaggtacatgagatactttgatagaggcatacaatgtgcaataatcacatcagggtatatggcgtatctattacctgaaacattcatatttctttgcgttacaaacattccaattgtactcccttagttattctaaaacatacaacaaattataaatgactgtagtcaccttcttgtgctatcaaatactaggttttattcattctatctaactatatttttgtacccattaatgatacccacttccctgacccccaccactacccttcacagcttttagtaaccatcattttactctatctccatgagttcaattgttttaatttttacttcctacaaattagtaataacatgcaaagtttgtttttctatgcctggcttatttcacttaacataacgtcctccagttccatccacgttgttgcaaatgacacgatctcattcctttttgtagctgaatagtactctatcgtatacacgtgccacattttctttatccacttgtctgttgatgaacacttaggttgattccaaatcttggctattatgagtagagctgcaataaacatgagagtgcagatatctcttcaatatactgatttcctttcttttggctatatacctagcagtgggattgctggatcgtatagtagttctattttcagtttcttgagggaacttctatactgttctccagagtggctgtactaatttacattcccactaacagtatatgagggttcccttttctccactagcatttgttattgcctgtcttttggataaaagccattttaactggggtgagataatatagttttgatctgcatttctttgatgatcagtgatgttgggcaccttttcattcgtatgtcttcttttgagaaatatctattcagatcttttgcccatttttaattggattattagattttttcttacagagttgtttgtgttccttatatattctggttattaaccacttgtcagatggatagtttgcaaatattttttcccgttctatgtattctctcttcactttgttgattatttcctttgctgtgcagaagctttttagcttgacgtgatcccacttatccattttctttgattgtctgtgcttttgggatattactcaagaaatctgcttggccaggtgtggtggctcttgcctgtaatctcagcactttaggaggccgaggcgggtagatcacttgaggccaggagtttgagatcagcctggccaacatggcaaaatcccgtctctactaaaaatacataaattagccagatgtggtggggcatggctataatcccagctacttgggaggcctgaggcgtgagaatctcttgaacctgggaggcggaggttgcagtgagctgatattgtgccattgcactccagcctgggctacggagtgagactctgtctctaaaaaaaaataaaaagaaatctgctgagtgcagaaagctgacgcaggaggattgcttaagtccaggagttctgggctataacgcactatgccaatcaagtttctgcactaaatttggcatcaatgtggtgacctcccaggagcaggggaccagaccacctggttgcctaaggaggattggactagcccaagtcagaaatgtagcaagtcaaaacttcaatgttgccaggcacagtggctcacgcctgtaatcccagcactttggaaggccaaggcgggtggatcacaaggtcaggagattgagaccatcctggctaacatggtgaaaccctgtctctactaaaaatacaaaaaattagccaggcgtggtggcgggtgcctgtagtcccagctactcgggaggctgaggcaggagaatggcatgaacccgggaggcggagcttgcagtgagctgagattgtgccactgcacgccagcctgggcaacagagcgagactccatctaaaaaaaaaaaccttccatgttgatcagtaccaggatcacacctgtgaatagccactgcacttcagccagagcaacatagggagatcccatctctaaaaaaagaaaaaagaaaaaattttgcccagactaatgtcctggagagtttcctcaatgttttcctttagttgtttcatagtttgaggtcttagatttaagtccttaatccattttgatttgatttttatatacggcaagagataggggcctagtttcattcttttgcatatggatatccagttttcccagcaccatttactgaagagactgtcctttccccagtgtatgtacttggcacctttatcaaaagtgagttcattgtagatgtatggatttatttctggattctctattctgttcccttggtctgtgtgtctgtttttgtgtcagtaccatactgtttttgttactatggctctgtaatataatttgaagtcaggtaatgtgattccttcagttttgttctttctgcttaggatggctttggctattctgggcctttcatggttccgtataaattttaggatttttttttatttctgtgaagaatgttattgttattttcatagggattgcattgagtctgtagattgcttttggtggtatggacattttaacaatattaattcttccaatccatgaacatggtatatctttctattttttgtgtgtctgcttcaatttcctttatcaacattttatagttttcattatagagatcttttacttttttgattaagtttattcttggtttttatttgatttgttgttattgtaaatagaattaccttccttcagattgttcactattgacatacaggaatgctactgattttttatgttgatttttatatcctgcaactctactgaatttgtttatcagttctaatagttttttgatagagtctttaagtttttcccaatgtaagatcatatctgcaaacaaagataatttgacttctttctttccaatttgtatgccttttatttatttctcttactgggttgctctagctaggacactgactactattaaaatattcaataacagtgatgaaagtggacatctttgttgtgttccagatcttcgaggaaagactttcagttcttctgcatttagtctgatactgacataggtctgttgtatatggcttttactgtgttgagatatgttccttctatgtccagttctttgaggatttttttttatcatgaagggatgttggattttatcaaatgctttctcagcatcaattgaaatgatcatatgatttttgtcctttattctgttaatatgttgtatcaccttaattaatttgtatatgttgaaccgtccttgcatctctgggctgaattccacttggtcataatgaacgatctttttaatgtgctgatgaattctatttgctggtattttgttgcctcctgtatagtttttttgtttgttttgttttgtttttgagatggagtctcactctgttgtccaggctggaatgcagtggtgcgatctcggctcactgcaacctccgcctcctgggtgcaagcaattctcctgcttcagcctcctgagtagctgggattacagatgcacaccaccatgcctgctaatttttgtatttttagtagaaatggtgtttcattatgttggccaggctggtctcgaactcctgaccttgtgatctgcccaccttggcctcccaaagtgctgggattacaagtgtgagccaccatgcccatcctatacttttaattatctctagattacttatacccaatacaatgtaaatgctatgtaaatagtagttctactatattgtttaggcaataacaagaaaaaaactcttgagtttttttcaaatattttttatttgcagttgcttgaatccacagatgtggaacccatggatattgagggccagctgtactgtgatgtgttcatataatctctcagattccctgtgaatgcctaatgatagccatgtgccatgacctaaggaatattctcaagtcaatcttacacacctgaagttattcacatgatgtggttcaagtcctaggtcagcctttgccctttgagaattcacattatctctccaagcccccaaggtcttaactaatctgtaaaatagtaataacaatgcttttctcacaaggtacttctgaggtatattgtagttctgttctctttgagtctcgaatctttgttttaagcatttttgtgcaataaaatgtagattgtacatgaaaaaagtttaacatctggaaagaaacctcacatgtctaataaacaaaaatgtagtaaatataaaaagtaaatataaaaagtaaataagagttttagaaggcttctgcttccaaacaaaccagacttgctattgttaaatcatcctctgaagtttgatctttcttctgccaattacctgagcaagttaattaagttttctctctctctctctttttttttttttcaagatgcaacctccttctgttacccaggctggagtgcagtggcgctatctcagctcactgcaacctccacctcccaggttcaagcaattctcctgcctcagcctccccagtagctgggattacgggcgcccgccaccatagcttggctaatttttgtatttttagtagagtcagggtttcgccatgttggccaggctggtctcgaactcctgacctcaagtgatctgcccacctcggcctcccaaagtgttgggattgtaggcatgagccactgtgcctggccagtttctctcatcttcaatttctttatctgtaaaatggtaataaaaatggtacccatttcatatgggtcttctgaattcaaatgagatgatcttagcatagcacttagtatgcaggaaatattcaatatattttaggtattatttttaataatcagcttgcccaggaaacattggcaaagtgttataatttcctagagtcaactgtctcataagttttatgtaatacaggctctatcactttttaaaaattttcaaatcagtttgaaattttctgtttttcttgcctcctctcttgcttttacaacctggaaaaggtcttgtgaaatgataaagcttgttttttttgttgttgttgttgttttcagattgtcccagtgcttcgcatgtttttggctccatgttcaatccatttgctgaacacagtgaaagtatccagtatgtctttccaccgtaccctagagttggcatcttgtttaccagaggggagcggtgagtgttttcatattttttgtttgttcaagaggaattaatatattttgaaaatatatttaaaaatgcaacataattagagcctttatttataaccaccactgtctgttagtgattaatatgttaatttggatattttaaagacagatttttaaaagaatagaataagactcatttaaataatgcagaaatgctaaataaactaattttttgagcaactgagtttattttattgccctgctcctgacacagacatcaatctgttttaaacacatcagttctagaagtatatttagaagtacagggggaaatgagcacgtaagaatcagtcagtattcagagattaatccactccttttgtataaccatttttggtttttttttgtttgtttttatgttagtaaaatgtactttttctaagtttttccttcactgtaaaatatatctatcagttggttaaagcaggatgcaaatgtggtgggaattctgacttagcagggtttggcaaactttttctgtaaacaaaataaactttttaatgcaagcctatcacggatattaatcagattcacggagaaactaagaagccgcataatttcttcatagccctttaatagtcttctttgaagaaataagggtgttatgatatataatagactagaagatcataattaaataattatacagaagtaaagcaagattatataagtatacatagagactcagaatgcttaaaatgtttaagttcaaagttgtgtactatttttgtcctggcagaaagacctccattttatctttctttttctttttccttccttctttgtttgttttttttttgtttgtttgttttttgtttgacagaatctcactctgtcacccaggctggagtgcactggtgcaatcttggctcattgcaacctccacctcccaggttcaagctattctcctgcctcagcctcccaagtaactgggattatagtcacatgccaccacacccagctaatttttgtatttttagtagagatggggtttcaccgtgttggccaggctggtctccaacttctgacctcaagtgatcctcctgctttggcccgccaaagtgttgggattataggcaagcgagagccaccgtgcctggccaagacctcggttttaaatacagtatttacaatatccttttgaagttgtaagaagtcatggtgctgaatggttcattgttcaacagttcacttatttctgaacacactgagaagaaaacatccttcagttcttttatctccttctgtctatatattttacgtcccaatattagagacacataaaccagtccattttccatttcaaaaatgctttgacctccatctagctttcccactggagggcagtagagaaccatccaggccatccttgatttgaactaactggcgaatatgacaagtcagacttcaaaatacttaacacttaatccctactgatgaaaagtcataaccaaagtatcttttcaggaaacctattttctcccataaaagttctataattgatcatgaaaatacattaaaagaaataaagcaaaatgtgtttgtaaagtactaagtgggcaaaataaaaacaatataaaaaccatgtcacaaatgtgctttgtgtgtgtgtgtggtaggatttttgttaggagctgaactggctgaggcttcttaacaatactagtctaaaaacgtgcgctggatgtaaattttaatccacaaactgatgtgtcaaattggatgtcgcattattaaaaataaaaataatttcaagctcttggccagctaaaatgatagaaaacgtaacttcagttactgttaagattcttctgacactctaatataccataaagtcactcatgtatcccaggggttatatgcctggaagcaccaacaatcctcaggccatagtggttagggctgagatgccttagggtgtcagaaatatggtcctgtggaagtgggcgagccactggtcttttctgccgttgagactgggattttttgttaggaccgggaatcccagtgcctagggctgcacttcctgaagagctccagccatcacgaccaggttctgtcaccaacctagatgttttcagcagtggttacaggtctgccctctttgcagagcatctcctgctttcgctcactcctcctcttgcctccaaagagaattggcttctcctcgccatgcccctccccacttagatttatagtttaaaactcttcagtgagcttgagctttcactaagggcaagactagagatgatctttaagcagtttctgccttatgcccaggaatataaaccactcttgagaccagcaagcactgtgggctggcaaccctcagcagatggtggaaatggaagaaaaattacactaaaaacaaaatatactctaatgtctgaacaaatcatcttgccacagaagctggaactgaagacaattcttttcctagtaatctccctatagaaagcacaggcattctttatgtctctaagcaccttcaaactgcattcaaaattagggttgtgaatctggaatctttctttgctaattggttgtacatgaatgcctgcagaagcctttgaatggtaaatattgtgggaggggcagttgccatggtgactgtccaatggaccctttttcttacatttcaattaaatcttcattgctgaactgctatgaatgagaaggtaacaactcagtaacatctggaagacaggagaagatgtgagagatgctgttccaaatgtagctacattctaaatgccctgagttgtactacgtttgccttgaaccatctcttcatgggttcccctgcccactatgtcctttcccactatgggaaaatctgtttggaacacacatgacagtgagccaatttccctaataatacaagaagtgtttacaagttaatatgaaaaataccaaaagcacaataggaaaaaatgggcaaaagatatgtacaggcatctcatagtaaaagaaaataagtggttttaaattgcataaaaatatatttaacttcatttataatcaagaaaatacatatttatatagatataattttttacctattacattggaaaaggtttaaaagtttaataaggtactgtgttcagaggatgtggaaaaaccatctttttttacacttagattgggagggtaaattggtataaccccttcagagagtgacttagctctttttctagaaatttacctaccggtatattaacagttgacttaaaaacacaggtaaagggatatttattaaagcattattgaagtaaatgaccatgacagattaaatgaattgttgatacatccataaagatgcatccagacagttactgatactgccacgcataggcagttactaatggcttgaatatgacttgtcccctataaaactcatgttgcaatttgattcccaatgtaatgatgttgaaaagtcgtgggaactttatgaagtgtttgggtcatgagggctttgccttcatgaagacattaatgctgctctcatgggactgggttagttctcgatggggagttcttgctccaacgggactggattagttaccatgagagcagattgttataacacaaggccacccctcatgttttgtcttttttgcacactcttgctctcttgccatgtgatgccatttgccaagttatgatgcagtacaaagctcttgccagaagctgtcatcatgcccttgcacttctcagtctccagaactgtgagccaaataaacttcctttctttataaattacccagtcccaggcattctgttataacaacagaaaacaggacaagacagcagttaaagaatggtatggcatgagtgtttattgtctcagtttgacctgaagtagaaacataattaatataaaatctcaaataggtttaagacggatcctatgtgccaattgacaaatgaaatatccctgagaactagttataagcatctagcaggtttaaggatattaacagtgtcagaacatgggaagaggggttaaactatttctttggaaaaaatctgtactatgaactctatcccttctccgccaaggggatgtatgctgtgatctgaaatataatgaggtagatcttcagtgagagcatctgagagcttggtaagtgaccagatgggtggtctggggtgtaaccctccaaaatctagagggctagagatgggccaactagttgttttggtggtagagccacaagagtgctagttgacagactgtactcccacagttttttatttgggagggggtaggggtttgatgagggttttctgtagactagatggatgtgtgggagatgggagaaaaatccaggctgaactgaattaagtcccactcaagaggaccacctgggaggtgagaaagaagtcttcaactatgaaaaatgtgtgggtgcatcaccatgacccagggctgagagggatgcagctagtccaaggagcagaatatgtcacctcttcaggagacttgaagctgggtcacagagctggggctcccagaagtgcccaagaaagctctagaaggtaaaatgccagctttaatcatctgctagttccagagaagccaccagctaaggaagaactctcctacctccttacttctcaaatccttgcttcaaccttggtagtatctgaaatagcagctgtgaatgtggggtaaacagcctccccagtcgggtttgtgagatgttttaagggataggggcagtgatagttttaaggggctaaactttcagaagccgagtgtttattcctaaagttcatttgcttgagaaatttgcccacagctgagtgccaatgctggtccttcttttcttacctacactttcgagctgagcttccaatttacaaaagaaagtcatatgttctgaatctcactatcatgcactgacccctgggcaacaagcagggatttttgaaaaactggtgtcaaccttgagtaagtgaatgacccccaaaacccagtaacaatccttttgcaaatctcgtggtttaataaaactgaaggaggatctatcctgccagatgaggccctttatggttgccactggctttgcaagcatgacttaagtaaggaatagtctttattgagtaaaggaaaatcccccatgccaaggtaaacaagacagggatgttcaatgtccctcattctacccatctttccatgtgagttgtttctagggccagggcttctgctggacattttttttttctagtagagtgacccattcctggaagtggcctccatgggaggaagtggcatcaggcagtcttgatttggagggccagctgttttcagaagttgtctaggaaagttagctctcctacccctgggggctttagggacatctagagcgacagactctctctgacttaacactaataaggctcttctaagccctgaagacccagaccatgggctctgtccttggcttgcttattctgctttcagaaagaatcctgctgagttagtgtcactagaatcccccacccttggtatctgaccacccttgatatctgatgaaattcctcaacccctctccctcagtatcttcttatcctggctgccttcagctagaagctgagtcagtttagaatccctcttattgctgatgttcccttttagtaatttccatccactgacctcaccctgcaccttggccataatttcccacttgtccttgtattcagaagggagcccattctaaactgaggtctctctttccctattgcaatagctcctgaataaaatttgtcttcactgctttaacttctgtctggccctggttttccttgacagaggtctgcaggatgttaaaggccctttacccgggagaaaatcactggtatcatgggaagttggacttaaaggttttcatcatgatgggaaaagggagaactcccacgacccggcgaggttgtagttcagataattcgtggtgagcaaatgagttgtttagaagacatttctaaattatatcccaggtagagaacagtgaacacatcttaagtatagagcttaatgaattttcagaaagtgaaccttcacacataaaaaagaacacaggattattttaaagataaatatctgccttgtatatgacttgtcagctgagaaatcattgcagacaatctaatgacagatcagtatgtgatatttaaggttgaaaggattttcttctatgtttttttaaagttttattttatttttaattgacacataatgtaataaaaatatggaacacttcatgaatttgcgtgttattcttgtgcaggggtcatgttaatcttctctgtatcattctaattttagtatatgtgctgctgaagcaagtactcttttaagtatttttgtcaacaaaaatactgctttagttataaaaatacttagtgcattaggtataaaagaaagaaataatagcaatagaactgtcagaagcgtttgaaccagagaaacttcatcttgaattggggaggagtaaaataaggctgagacctactaggctgcactcccaggaggttaagcattcttagtcacaggatgagttaggaggttggcacaacatacaggtcatgaagaccttgctgataaaacaggctgtggtaaagaagccagccaaaacccaccaaaactaaggaggcgatgaaagtgacctctggttgtcctcactgctccttacacactaattataatgcattaacatgctagaagacactcccaccagcgccatgacagtttacaaatgccatggcaatgccaggaagttaccctatatggtctaaaacagggaggaacccttagttccaggaatttcccatccctttccaggaaaattcatgaataatccaccgcttgtttagcatataatcaagaagtaacaataactataaccagctgcgcgtcctgtgctgttcctctgtctagggagtagccattcttttattcctttactttcttaataaacttgctttcacttccctctatgggcttgctccaaaccctttcttgtgtgagatagaagaaccctctctgagggcaatttggcatgctgagtactttgaactaaaggagactggaaggtctcagaagcagcctcagaaccaaggtctctctgacctcctgctctcctgtctcccacccctcctctcttgaagtaagtcaggaacaagaattgctcttccccaggggttaaggggggctcttagaagctagaactccctttatccaaagcaagctgttactccaaacttcctccaacctttctgtctaagagctcgtgcagaggccagggggtttcacttggcgctttgagggtttgctgaaaaaccaacttggaaaaggcagattaactggagaaaaggcatacaaatttatgtaatgtgtatatacaggagccttcagaaggaagacccaaagatacaggggaaattgtccattttcatgcttaggttcaaaaaagtatggacagccctgtagaaatgtgattggacagaaagggtatgatctaatgctaatagactggggatatccagcaaggcctgtctgtctaaactcttctggccctctctgagcatgcattccttccttctgggtatggggcaggaccctttctgaaatgggagtcttatgacttacagtcaaacaaggaagatcagataactttttttatggccagttttacacagaaaggtagaggaaaagttagagtattatgttctggttttatgactggctttggggtaaaggggttctggtttctgtgacctgccttggggaacagggattctagtttgtatggctagtctcaggggagaaactttttctcttaaggctgcttctgaggccttcattttgggatattgttttctgagccccaacactggccataaagatgttctctgatctgcccttgcctgatagtaggtcataagacctaacctcattccaaagggtcctgccccatacccaggaggaataaatgctacaacagagaggccaagaagattctgaacagacaggccttcttgggcttccccagtctatctgctactattaggtcatacccttttgtctaatcacatttctacatggctatccattcttcatcgaacctaaacataaaaacaaacgattttccctgagtccctgggtcttcatttctgaagcatgtaaaactttgactaaatgaatctgttatgttcttctcttgttaacctgtcttttgttataggagtatctgcagtgacacttgtgatggggaggacaggtatcacaccttttggtccctacagtttatatacatagtcactactcctccatggagacagaaaaaactggtgattgggaagggggactgaaaggactgaaagttggggatcttggccaggcacagtggctaatgcctgtaatcctagcactttgggaggccaaggcgggcagatcacctgaggtcaggagtttgagaccagcctggccaacatggtaaaaccctgcctctactaaaaatacaaaaattagccaggcgtggtggcaggtgcctgtagtcccagctacttgagaggctgaggcaggagaatcgcttgaacccgggaggcagaggttgcagtgagccgagatcatgccactgcactccagcctgggtgacagagcaagactctgtctcaaaaaaaaaaaaagaaagttggggatctgaggtgaaaggcaagtctatttttcatcatctacctttatattctgcttgattttttctttgcttttgccataagcatatattatttttaaagagaaaagggtattttttataaacctactttgacaaataataaagcaataaaagatataaaggaagcattgcagaaaatacaaatagaaatgaatagaaatataaaagtcatggaaggagaaccctcaaaaaaaccctttcaggttttgacaattgagcagacaaaaaataagtaagggtatgaatagcagttctcaatataggctgtatatgaagaacaatttagaagtttctttttaaatgcttttttattatggaaacttcaaacatatgcaaaagtaatagactaaccaaatgagcccacatggtccaccacctagcatcaaccattatcaattcatgaccagctgtgtccccatccagtttccccctttccagattatattgaagcaaatcgcagaaatcatattgcttgatctataaacatttcttccagtcagtatctctaaaatgtaaggactccttttaaaaagcataaccacaatacccttatcactttttaaaaattaaaaatttgtaagcataatatcattatcacacttaaaaaataacagtaattccttaacttcatcgaaaatttagtgttaaagtttccaattgttgcacaaatgccattatttaatagctgtgtttattttattttatttatttattttttttttgagacagggtcttgctctgtcacccaggctggagtgcaatggcatgatcagggctcactgcaacctctgcatcctgagctcaaaatcttcttgcctcagcctcccaagtagctgggactacaggcatgcaccaccgtgcctggcttattgtatttttcttgtagggacaaggttttgccatgttgcccaggctggtctcaaactcctggactcaagcaatccaccagcctcagtttcccaaagtgctgggattacaggtgtgagccactgcccctggcaagaaaaactgtgtttaactcaggatctgagtaaggtctacacattttgattggttgatgtgtctcacaagtctcttattgtaatctatactttacctaggaagtgtcaactgaagaaagataaggttcataaatgtgggaaggaaagctttatgtctcataaagggttgcagcctgcaggatggccattctgacaggctgggaagcacagcctccagtaagaagccagaaacagacacttcaagggaggggcaaagggagcagaaatttatgtgtagcacagtggccaaatatacatatttattaagctataggaaaagtcatgaatatttatgaaaggagaaacatgcacatgcacaattgagcttcacgcctctccatgagtcccagggacaaaacatagcaatgtcagcatgatctgagggtggagtttttggccctctgatatcaaaaggtgaagcagaggacacacaaaccattactgtgccttctccttagacaggccagaactactccagtggtgatctcttatcagggaaaaaaggaggggcagccttaggcacttggttgattgatatctgtggtggagtcttttgaaagggctggtttctgctaagccctgagggaagaaagcctaatcatggttagtcagggagggggtataacaaggtgtgtctgaacccccgatcccatcatggccaataactcagttttcaagattatgctggggactccttggccaagcagtcagttgaggggcttagaattttatttttagtttacagaagcttctagaaaatgttgttcaggctccatccagacaacattgaattttacctgagtcgtatcattgtggaaaaaagaaacagttaagaatccttcccttgcccacccattttgtgttctggaaaaggcccattgcaaagaaccatcctttcccacatgacttaggtgggactcagaacaaatgcctgttaaccaaacttcggttaagattctctccttcactcaggtccccacaacatcttcttagcagcccctcaagaataggctggcctcagagcaaaccattctctgatctgttattccatcaggccaccttttcatcccagttccccacaccagggtctttcttgtcttgtttactcctctctataaaagaaatccctttttggccttgagagctgtcaaaatcattaatagggaggccattaggctaatacagctccagcaccttgagttcctaagcaaactaaaacccaactcaatgtaaacaataaagcaaaacttaagcttaaccaatcagaaactgccaactaacctctacctagagacttcaccaatcagaaatggccaactaacctctaactagggattttccattttaaccaagcaaatatttaatttgccttacttctatgaacaccttcaaaaagtttcccttaccttcttggtggagcgctaaaccacctgtggtctggtactgccccatccacaaatagctgaatgctcaaataaacttattaaaattttaatgtgcataagcttatttttttttttaacagatcttatggtcagaaggttctctctgttgtaatagctcttctctcactattgcaatagttcctccccactcccctttgcaatatttttttttgaataaagtctttccttactaaatctggatttgttttttatttcaccattcccagaaattttgatgcattctccagttgattataatatgaaatgagaattgagagccactgcttagaggatgtgaacagtgcatttgctaggacaatctaatacatatacatatctgtgttagtgtgtgttcctacagaaagcagatttaggaggtaatctcaggaagcccaagagaaagagcaggaactgtgagacaggaagaggaaaaagcccatccagggtgcataaaaaatgagtgggtttcttctgtgggtgaccgaagctcagtctttttggggattctaggaagaatatatacaacacaccttcgattttctctctcaagggacaggaaagctggggtttgtatcccttttttcctgttcctcactgattgagaattatctctgagagtttcaaatctcaaacactgctggactgccctggagcaccttcaggtagacaagcagagaaatgtacaggttcttgagggaaactgtcctgtcggcacattgcccaatgcagcttcaggcaaactctgaggcgggacaaaggaatatggagttggagatcagtaacatccgttgcaacattgaccacacctattgagaacatccttttttattctttcaagtatcagtgagtatcaaaatttgaccacaaagaaatctataaattttcccaaatagaaactttaattgagatttgttgaatgcttactatgcgctaaggcttcccagatacttattatctttatttaactcttggggcaaccatttgagataggtattattatcatctccattgtacaaatgaagaaattgagccttaggttaaatactttgcgcaaaatcatatagtcagaaaaagacagagcagggatgtaaacctcagccttctgactcaagcattcaaactattaaccactatggggtctgcttcaccacagcctttactcataatgtggaaaaacaagaagtttataataacaatgatacaaaatgatcaaacagtaaataccccaaccatttggagatttaaaaaatttatctgatgagacaatgaaagcgatgataagaaaaaccctataaagtaaaatgtatgggttatggataaagttgtgataaaagggaatatcattataaataagaaagtgacatatgaattaaacattctactcaaaagttatgaaaagaacaaattaagctttggaaaatggaagtgagggattcataaaaataacagcagagtggactttgacttcaggtaaagatggcataacagaaactggattgatcctcctgctgaaacaatgaaaaaatagaccaaacatgtgaaactgcaactgctcaatggactcttcctgcccagtgcacaaacaaaatcaattcatggagaccatggcattgcagtaaagaaagagtttaattgatgtgaggccggccacgtcacacaggagacagagttattactcaagtcaatctccctgaaggctcagaggttaggggtttttcaaaggtagtttggggaaaggggtagtagtgcttgctggtaattggttggaggtgcaatcaaaagggtgtgggaaatgattctcctgagcactgagtcacttctgggtggggtcacaggagtggttggtgggtccaggtacagccatccattatcggacatgcaaaaaaactgaaaagatatctcaaaaggccaatcttaggttctataatattaatgttatctgcaggaataattggggaagttgcatatcttgtgacctccagaataatggctggcaattgtttatgtctacaccttagcagaattcaggcttctctatcctcctagcctggtggtctctcattagctttacaaagatggttgaattttggggaagggttattatcatgtaaattatgaactatatttctcccaaagttagcttgcttaagcctaggagggcagcttgaaggctaaaggcaaaagaaagagcatttggctagatcagatctcccccactgccataactttatcactgttatataatttttgcaaatgcagtttcaaaacaatgatttatttatttatttatttatttttgagacagtgtcttgctctgtcacccaggctggagtgcagtggcgccatctcggctcactgcaagctctgcctcccgggttcacgccgttctcctgcctcagcctcccaagtagctgggactacaggtgcccgccaccacacctggctaattttttgtatttttaatagagacaggatttcaccatgttagccaggctggtcttgatctcctgacctcatgatccacccacctcagcctccaaaagtgctgggattacaggcttgagccaccgcgcctggcccaaaacaatgattttttaaagacactcaacatcaaacaacaaaagacagtttccttaacaggaaacaaaggaggtgaaccctatcttgagagagcttccaggtcttagaacaggaaggggaacccagcagagtacagtagcttccttgagttgaggagaagtagctgagagtctgaaggagaataaaaacacccggagttttcaggacagacaaccaacaaggaaagaactgcacacagaaagaaacccagagatctgtagagagttcttttctagtatttggcagagtactgatcagtgcatgtgtgtgaagaatcaacctgaggtcaggaaaagaagtttctaaaaagattagaagtaacagtgcccagggttcacaaaaagccaggaatagtggcccaatttcaccagccagggcactgggtagtccctgtggaagagtcttgccttaataatgggaaataattagcccccaaatgaatgctgttgcagttttacctaacaaatcttaaaagtaagaccacaaagaaacaaaactctttccaaataaattaatggtgttccagaacaaagtttaagaatatttataggaatacaaaatacccacacctaacaagtaaatttcactatatctgccacccaacaaaaattgccaggcatgcaaaggagtaggaaaatatgacccataataaggagataaattgttcaatcaaaaccacgcagaagtgccataggtattataattagtaggacattaaaacagttgtaactatatgcatatgttcacaaagttgagtagagatataaaagatgtaaaaaaaaagacatagaacttctacatgaaaactgtaataaaagtgaactgcaggacaacttcaaacaatacagttggagcttccaaaagagaggaaagagagagagagacagaaaaaatacttgaaaaaataatggttgaaattttcccaaatttgatggaaactatatagatccaagaacctcagaaaatactcaagtacagaaacataaagaaaacaactctaaggcacatcataaaactggtgataaagagaagctcttaaaagcagccagagagaataaaaggcattacagaaaagcaaggatgaggatgactttagatttcttgttcgaaacaatgtaagtgagaaaatagttgccttggtcagcttgggctgctgtaacaaattaccatagactaggtggcataaacaacaaacattcatttttcagggttctggagactgaaaagtccaagagcaagatgcaggcagacttgatgtctgatgagagctcactttctggtttgcagaaggccatcatttttattgtgttctcacatggcagagagcagagagagaagaagcaagctctcttgtgtatttttataagatctctaatttcattcctgagggctccactctcatgatataattacctcccaaaagctccacttcccaatatcaacaacacggggtgttaggatttcaacatatgaatttgaggggaacacagtcagttcaagcactagtgaagcaacatttttaaagtgctaaaataaaaatactatcaacttataattttataaccaataaaaatatcttttaaaaatgaaggctggctgggcacagtggctcacacctgtaatcccagcactgtgaaaggctgaaatgggtggatcgcctgaggtcaggagtttgagaccagcctggccaacatggtgaaaccctgtctctaccaaaaatacaaaaattagcctggcatgttggtgtgtgcctgtaatcccagctacttgggaggctgaggcggaagaattgtttgaacccaggaggtggaggttgcagtgagccaagatctcaccactgcactccagcctggcgacaagagtaagactccatctcaaaaaataaataaataaagttaagtaaataaataaataaaaatgaaggcaaaataaatatgttccaaacttaacaaaggctgaaagcatttatcactactacatgatgcactataagaactattaaaggatgtctttcaggccataggaaaatgatgccaggtggaaacatggatctacacaaaggaataaacatcagaaattgaattgttttcagtgccttagtttgtatgcacatgcttgagctgacagggtgtttcaggcaatacctcatacttgcaactttctctgggggatcacccctgaacaactaaagccatcttaccccagatacctgagaattttactgccttccctaccctggcagcccatggccaatgaccatctgcaatgggggtactaaagcccctttccttgcctcaaagtgggacagattctgtggcacaatttatacttcaaagttccctgtgggatcaggtgaagctagacttcactttaacccacattcttacatagctccttttccttccctaccctgcttctctcattcccttatcagtttctcctgatagcgccttaaaaatatatcacatctagtggctcatgcttgtaatccaagcattttgggaggctgagtttggcggatcacttgaggtcagaagttcgagaccagcctggccaaaatggtgaaaccatgtctctactaaaaatacaaaaattagccgggcatggtggtgagtgtctgtaatcccagctacttgggaggctgaggcaggagaattgcttgagcccgggaggcggagtttgcagtgacccgagaccacgccactgcactccagcctgggagtcagagcaagactctgtctcaaaaaatatatatgtcacatctttcctgtgatgaccaaaacaatccagtgctcagtaacccttttcagtgtagtcactgtctctatgagaaataaataaacatctatttgtttaagccactggaaaaaattttgcatatatatgaacctctgtttcaggctctgcttctgggaaacctgaattaggagaggcacagagtatacaaatgtttgtatccaatgtaaatactgagcagatggcattaacatcagtggagcttcacaataatcaagcttcaagatgatcatcctatggccataagtcagtctcttttttcagtcgttctgtgcttactcagtgggtttgtgtatagaaacccaaagtggttgtcttagtccatttgtgctcctataacagaatacctgagactgggtaatttataatgagtggaagtttattggctcactgttctggaggctgaaaagtccaagatcaagaggctggcatctgtcaagggctttcttactatgctatcacatggaagaaagtagaagggcaagaagagagctagaagaggctaaatttgcccttttataacagcaccaatcacacccatgagggtggaggcctagtgccctgatcttaatggctctctcttcttaaaggctccacctcttaatattgctacaatggcaattaaattttaacatgagttgtggagagtaacaaatattcaaaccatagcagtggccatgacatcagaaacataggccatgcctcagctcaacagcatggactttcccacaccaagactgatttggctgctgctgctgttgagtgcacaatatgccaacaacaaaggctgatgatgagcccctcatactatatcatttccttgggagaccagccagccacctgatggtagatcaattacacagaagcccttccatcattaagtgggcagcatttttatctcattgaattttttttctgaatatgaataattgcttctattcaacttgctttaactagcagcactatccatggatttataggattcctattcacccccaaggtatcccacacaacatcacttccaatcacagaactcattttaccataaataagtacagcaagggattcaactggtcttactatgtgtcccaccatccagaagcagctggcttgataaaaatggtagaatgatctgctaaagactcaattatggcagacataattgagagacaatactttaccaagttgggatattgtcttataggatgtgttttgagccaataatttatatatgtttcattttctctcctggcaagagcacactgtttggaaaccaagtgatggaaatgggaggggctcctttttacaattaataacctgtttgcaagagtttgttgactttgtctgtaaccttgacttctggtctagaagtcctaattcccaagagcagaatgcttacatcaggagacacaatagttccattgaattggaggcatttctactcaatgaggactgagaagaccatgtctggaatcacgaattccctggggcacctcttaatacttgcatgttcagtagaaaaggtcagtgtggaagaggtgggtaagagtgaccacaaaaattcaggacgagtaaggactaaaacccaaaaagaatgaaggtgtgggtcacctcactgtgtaaacaattccaaccagccaaggttctgctcgaaggcaaaggtattatggaatgggtaatggaaaaaggatgtgataagtatcaactatggtttcatgatcagatacgaagctgaggactgaggctgcagtgttatgtgtatttaaaccaataattccaagcctctgcccttcatcttttccctgtggttttgcacaaagactttcaatggtgcttaactttaattcaatggcaaccaggtatgagaagatacagccagacctgctgttgctgcatatcccttggagatcttagatttgatgtggacaacatgacagatgagattttgtgtttccccttgttggggagagagcaagaacatccttatttgttggacagatcttccgcctaacattttatgttaggtagaagcataaggttgttttatgagagttaagtatgggcagaaagattagaatggatgctgaatagcaaaaagggtgggctatgctgatcctgtgcttgtttgtgcctctccctttcttcctgtgacttcctggggcttccccgctgtgggctgcattttccaagatcttacgtcagctgacttctggctgggttcagccaatgggaggcactactgggagactggaaaaaaaaaaaaaaggcagaagccagagaatttcttcctctttttctgtgtcctagcatcatctccagcagggactggatctcctgcatagctccaactatggcatatacaaattttatgtatgtgaaagtttgtgtgaactaagcatgtaaaatgtgtttttggatcacttagtttgttatacctgccaagaaaaaggattggaagacactgttaatgatgtaatttgctaaagatcattatctctaagtggtagcattattgatgactttttttcatttggttgttttttaaaataaaaaagtatgccaccctctcatctctgttaatgctctttgatgaacagtgcaaactgtcacctggtatttattttcaggaacctctaatagcagctcatcaagcatttatcttgcatttataaactctagctggaggtacatttttagccatcctcagttaaaaaaaataattgcagtagaaactgtagaaatgaacataagaaaaagtcaaagatgagcataatcatttattacgtaagcattgctaccttttttctgcccacatagagatcaggaagagaaaacatcttaagtagaatttatgaagcaaggaagttattggaaaggagctcaaagaaaaactgctatggagttttcatgtaaagaaaatgatccaggccgagcacagtggctcacgcctgtaatcccagcactttgggaggccaaggcaggtgaatcacttgaagtcaggagtttgagaccagcctggccaacatggtgaaaccctgtctctaatacaaaaattagctgggtacggtggcacatgcctgtagtcccagctgcttgggaggctgaggcaggagaattgcttgaacctgggaggtggagccttcagtgagccaagatagcatcactgcactccagcctgggcaacagaacaagattctgtcaaaaaaaaaaaaaagaaagagagaaagagagagagaaagaaagaaagagagaaagagagagagaaagaaagaaagaaagaaagagcaaggaaggaaggaagtaaggaaggagctgatccagtacaccaagtttattcaatcaacagaatttctttccttttctttttttctttttgagatggagtttcactcttgttgcccaggctggagtgcaatggcgtaatctcgactcactgcaacctctgcctcccaggttcaagcgattctcctgcctcagcctcccaagtagctgggattacaggcatgagccaccatgcctggctaattttgtatttttagtagagaaggggtttctccatgttggtcagtctggtctcgaacttccgacctcaggtgatctgcccgccttggcctcccaaagtgctgagattacaggcatgagccactgctcctggccccagaatttcatattatttaatttgtaaatctcaaagcccaaatcaaatattatttttcttttctaaaatgtttttatttatattttaaagataagagagtttccttgtccagatcagtctgacctgttttttgtaattcagaatattattggtagaacatacaataattttttgacttaattgtaatctgagtgactatcaagtgcactcctcttatttaacgggaaattgagagcaagtgacttggttaggatgagacagagcagggaccatttttaggaacccgccgcccccaaccttggaaatataggaaaatcttgagctccttcaaggagacttccaggcatctagctagccttgagaaataaatgagcaacctgataagcaaaaagttagcttaaaacagtagactaggaagttagaaccacaagatatttggttccctatagaaactaaagataatatcttatcatatgtcctttttcagagttgttttttcagaaacctggacctccaccaaatggaaaatgccatctgctggcacgtagacctcagataaaagggaactgaggaccaaactctgaccactgttctttgttctaaatttcttcctgagggccctggagaaggacacgcctgcaggccagaacttaacattcctttctgctgaccccaagtttttaggcaaagccttacttcctgaaccaattgcaaatcagagaatctttgaatccacctatggcctttaagccctcacttaaatatatcccacctttttaggccaaaccagtgtataaccttcatgtatcaatttataattttgcctgtaacttctactttcctgaaatttacccctgcctttaaaaaccctttctgtaaaccatcagggaggtcgggtcttaagcatagctgcctgagtctccttgcttggcaccctgcaaataaatgccctcctttctcttgctgcaaaacctcagtgttaatgtttggctatgctgtgccagacaagcagaccctaggtttggttcggcaacaaggggagtaagtggcagagctggaaccacagtccgctctcttgattctgaattcactgtttcttataaatattaatggttcttcaatgaacagcagtttttcttcaaaccacacacacccctcctcagcaatcccacccttgttattctcttatgttccaccccccagttcggaaacatgtattacaatcttccatttctcaaatcaaaatttaaaatcccaaatttactgcagtggtctctgaatcagaaaatttagctgctatctcatgaatttatctattgtaaagtcaagaaaaaagaaatattaggctgggcagggtggctcacgggctgggagtggtggctcacgcctgtaatcccatcactttgggaggccgaggcgggtggatcatgaggtcaggagatcaagaccatcctggctaacacagtgaaaccccatctctactaaaaatacaaaaaattagccgggcatggtggcgggcgcctgtagtcccagctacttgggaggctgaggcaggagaatggcgtgaacccatgaggcggagcttgcagtgagcagagatgcgccactgcactccagcttggggaacaaagcgaaactctgtctcaaaaaaaaaaaagaaaaaagaaaaactaaaacttctgtttgtactaatttttttctattttcagctttcatcttcaacaaaattatacataattagagtcaaataattccacaggacttgttgggaaaatgccatctccctcttcatttcccccttctagaggccactacctctacttttatttgtgggttttttaggatttattttcatatctctaaatgacatgcttatttttaaaaccttctttttagaattagttattatctgttgacttctcactatggaagatgagaatttagctcttttttgacaacttccgtttaactagacttgcccctactatctaatatagttatgtcatacctttgattagacaatatcattttacgttaatatggctatgtacatgccctggctgggcacagtggctcatacctgtaattccagcactttgagacgcggaggtaggaggatagcttgagcccaggagttcaagatcagcctgggcaacataatgagacccctatctttaccaaaaaaaaaaaaaaaaaaaattagctgagcgtgatgatgcacacctgtagtcccagctactcaggagactgaggtgggaggatcacttgagttctagaggtcaaggctgcagtgagctataatcatgctactgcactccagcctgggtgacaaaacaagaccctgtctcaaaaaatgaaaataaaaaatatttttaaaagactgtacacactcttttcagctgagccatctagtatgctatgcttagttttccttttctgttcaactttctattttctctggaatttataattgtttgtttgctttggtctacctaacaaaaattcaacctaaactctccattagttttctgaatcagcaattctcaaactttctggtctcaagagccctttccactcttaatatgacggagaatcctaaagagctttatatatatatgtatatatatagacacacacatatatatatgcactttttatttttgcatgagcaggatcagacgaccaaagagcttttgattatatgggtcatatccactacatttatcatatttgaaattaaaacttaccaataataaaatctatgtattaatacatgaaaatactaaatgtattttatgttaacatttttcatgaaatgtaactatgttttctaaaacaaaacaaatataataagaatgatattattttacatattttcaaatctctttaatgtttggcttcttggaagacagctgacttctcatatctgctttttcattcaatctgttgtaatatcacatgccatgtagcctctggaaaacttttttgtatacttatgagagaaggagattgaaaaagaaaaataatatctagtattattacataaatagctttgaccttgcaaattatctaataaggtttcagggacccctagggccactggacctgactttgggaattactggtccaaatatatatacatacttttttttttgttttttgagatggagtcttgctctgttgcccaggctggaatgcaatggtacaatcttggctcactgcaactctgcctcctgggttcaaattattctcctgtctcagcctcctgagtagctgggactacaggcacgtgccactacacccacccttgtattttagtagagatggggtttcaccatgttggccaggcaggtctcaaagttctgacctcaggtgatccacccacctcggcctctcaaagtgctgggattacaggcatgagccactgcgcccagctccaaatatatttagatgcattggatgttctaataatttaatcttttaaaaaggacttccttctggatctttctgactgctccatttgaaatggtttccctctatatctggtgctcagcagttatccgggtgtctcctttcaccaaaatccagaggattctcttgatttctcttctatgctatatactcttcccatatcctaaggcttcctctttcttgttctggtggaatatatcctgcagtagctttctgtgaaatgatgcctggggacacattttttcagaccttgcatgtctgaaaatgactttattctcctctcatacttgattgagagtttggctgaattaatataataatttggaaatgattttccattattattttgaatgaattactccattatcttttagaccccaatgttgctattgagaagtcaaaagccattgtgattactgatcctgttactctacattcagagaacttttagtattaaaataaaaactttttgcctctattcaaaacacttctgacaccaaatgtgtagatttcccacaccgagcaattctccacttctctctggacaccaactgggtgtcctacaatttaattcacttctgacactaactgtccagagttaatgcagaccccgtagattaagggctcagtcccataagactgcccccaatttcagatgccagttgcaagtattgggtgtttagggccatccacacttctctccaactttgctacatatctggggtttccatgaccttctcctcaggtttgataatttgctacaatgtctttcagaactcaggaaaacactttacctacacttacttgtttattataaagaatacaaactaatggccagatgaagaggtacatagggcaaggtctgaaatggtcctgcgtgcaggagctcctttcccgatggatttgggatgtgtctcctggcacaatgatgtattccccaacctggaaacttttttaagtgttatttagggtttttatggagtttcctttatgtaggcataactgataaattattgccattggtgaatagctcaatctccagcccctttcccctcctaaaatgcctcagtctttctggcaaccagaccctatcctgaggctatccagggaacccagccaccagtcattttattaacatgaaagaagactctcctatcactctggagattccaagggtcatagaggctcttatgtcaggaaccggggactaagacccaatgttataacaaaaggtgctcctatcactcaggaaattacaagggttttaggagctttgtgccaggaacaggggatgaagataaaatggacatttctttaaaaaattgtttaaaatttttttagagtgctttgagttgctcttttatgtatatttcttattatatcacaagtattttctctttcttcccagcattctaaaatctcccagtgatatgtcttggtatgagtccagtgtactgggcatttcctaggtctttttaatctggaaattcatgtttttccattctgggaaaatttcttgaatttttcctttgataatagtttcacttaaattcttctttttctctctctctatgaaactactattcagatcctctctccaccaccactttttttctatgtcttgtttatttttgttctacttttgtacaattttctcaattttatttttcaattcttctattgaattaaaaattttttcttttagtgacattaaagtcctctgaatgctcctgtttgtttatttaggtttggtttggttttggtttttctgagacagggtctcactctgtcacccaggatggagtgcagtggtacaatcatggcttgctgtaaacttgaacccctgggctcaagcaatcctcccaccttggcctcctaaagtcctagggattacaggcaagaaccactgtgctcaagtagtttcatggctgcaacattttctctaagtaccctgaagacttcgataatatgttttcttcttcttcttttttttttccttctttcagaatctgtttcctcaagattgcttttatctattggttggtttgtctccatctttcataaaaaagctcccagatgtctgttgattcttgattggttatataatggtggggcatgcaaaccctgattgagcatcagatgtgggctttatcatagaatgatctggctgggctattttcaaggaatcctttatgttggtatcattgggacttcttgggctggtcagattctcaagagaaggttctttcattcccagatattgattagttgtttaggttgtcacttgaagcactgaaagatcaaatatgttgataaacacaatacacaatgcaaaactaagcaaaggccatgtgtggacttcatagtgaatatcagaatgtaaaggataaagggaaaaatcctaaaatcttttagagacaaaacatgtattacataataaggaatgataatcagattgtcataagccttcttatcaaaaacattgaacaaaaaagacaatagagcagaattttcaaagtactgagagaaaattactttatatttagaaacatataccaagctaaactgtcattcaacattgaagatgaaagataactattttcttaaaaataatgatttagaaatctcagtactctggactttctctgaaggaattattaaagtatgtactcaggtaagaaaaacaaaacaaaacaaaaaaaacaaaaaacaaatccgagaggtagtgggaggcaggaagcagaatgaggggaaaaaattagtaaagctcattgttatgtttaaatactgattgagggttttgttcaaagcctcagagtgagcacatgccaaatgctttttcctttgctccaaatatgtaaaaatggataagacaatattttaaaataaaaaaatatggatagttgatctagaagttaatggaaagtttatgtgaagcaaaaagacagcccacatggcaaacaagggctgaagtcacatggtccttggggaaccaggactgtaaatgggcactttgagccaaaacttaatgcctttgcaggaatgggagccacaaacactttcacacgtggtaggagactagaatggggctcattatgcgaagccagaggtaggaaaggaaagaggttggtccctgagatagctttgttacccctctcaggggttgtagtcacttgccaatgtctggggagatcctagtacagaatggcagattttgctcagagccctgtattgagggaagagagagaccctctcatattgttttatactgttttatactcagtacctgttttagaagaaacaacaaggaagtaaagccaaagacaggcagcccggcgccaggcctgaaaccaggcctgggcctgcctggcctaaatccagtagttaaaaatcaactcataacttaaaaaccgatgttattcatagattccagacattgtatagaagaacattgtgaaactccctgccctgttctgtttctctctgaccaccagtgcatgcagcccctgtcacgtaccccttgcttgctcaaatcaaacacgaccctttcatgtgaaatccttagagttgtgagcccttaaaagggacaggaattgctcactcagggagctcggattttaaggcagtagcttgctgatgctcccagctgaataaagcccttccttctacaattcggtgtctcagaggttttgtctgcagcttgtcctgctacagtatcacatgagactgaagcagaagatatagaattatatgtatgaagagtggaaagaaaaaaatcgtcaacctggaattctacatataattaaagtgtgagggcaaaataaagatattttcatattctgtacaatgaaaattacaaaacactgcacaaagaaatcagagaagacacaaacaaatgggaaaaaaaacattacctgctcatggataagaagagtcaatatcattaaaatggccatactgcccaaagcaatttacagattcaatgctattcctatcaaactaccaattacattcttcacagaactagaaaaaaactattttaaaattcatatggaataaaaaaagagcccaaatactcaagacaatcctaagtaaaaggaagaaagctggaggtgtcacattacccaacttcaaactatactacagggctacagtaaccaaaatagcatggtaccagtacaaaaacaggcacacagaccagcggaacagaatagagagcccagaaataaggccgcacacctacaacaatctgttttttgacaaagctgacaaaagtaaggattgagagaaagactccctattcaataaatgatgctgggataactggctggccatatgcagaagactgaagctggatcccttccttacaccatatacaaaaatcaactcaagatggattaaagacttaaatgtaaaacccaaaactataaaaaccctggcagacaacctaggcaataccatcctggacataggaatagggaaagatttcatgacaaagacaccaaaagcaattgcaacaaaagcaaaatttgacaggtgggatctaattaagcttaagagcttcatcacagcaagacaaaccatcaacagagtaaacaacctacagaatagcagaaaatattggcaaactatgcatctgacaaaggtctaatatccagcatctataaggaacttaaacaaatttacaagaaaaaaaaacccattaaaaagtgggcaaaggacatgaacagacacttttcaaaagaagacatatgtgcggccaacaagcatatgaagaaaagtttaatatcacagatcattaaagaaatgtaaatagaaaccacaatgagataccatctcacaccagtcagaatggctattactaaaaagtaaaaaaagaacagatgctggtgaggttgtggagaaaagggaacacatacactgttggtggaagtgtaaattagttcaaccattgtggaaatccatatggtgattcctcaaagagctaaaagtagaactaccattcaacccagcaatctcattagtgcgtacagacccagaggaatataaatcattctaccataaagacacatacatgcagatgttcattgcagcactgttcacaatagcaaagatatggaatcaacccaaatgcccatcaatgacagattggataaagaaaatctggtacatatacatcatggaatactatgcagtcctaaaaaggaatgagatcatgtcttttgcagaaatgtggatggagctggagggcattatacctagtaaactaatgcagaaacagaaaaccaaatactgcatgttctcacctgtaagtggaagctaaatgatgagaacttatgaacacaaagaagaaaaacaatagacacgggggtctacttgaggatggagggtgggaagtgggagaagagaagaaatgatagctattcggtactggacttcatacctgggtgattgaataatctgtacaacaaattcccatgacatgggtttatctatataacaaaccttcacaggtacctctgaatctaaaataaaagttaaaaaagaagtattttctacaaagactaaataagtttactccctactagttgggtaggcaaagcactgtaataaacaacttttaattttctaaattaagttcctaaaaaagaacaagaacatgatcttgttggctgatttagactgaacttagctgcagcagttcagcttgactccatgggtctcctatccttctcctggccaagcaggctaacgcaagtatgtttctctttggcagaggcagaggttcaagaaagcaaacaaaattacagaagagcatttaaggtttgcaaccaacatactatgacttctactttgttccactggccaaagcaagtcacaaagccaaatgcaaaatcaaggagtgctagaaactgcaaagccacatggcaaagggtatggatacagagaagggtgaagaattgtactacatctgtctcctcacatcttacatacccttgatgtcagttggagcctccatggtttgtgtgatctgggtaaaatggttttgaaccttcagttacaaaacttgtagaaatacaaatcccttcttagaagccagcaaattcctggactgtgtatgttttcctgttcctttttgcctttggccttttgcttgtataaatcattcaagatggtgaaactcagctctttttacttcacaaacatagtccatttgcacaaagctcatgtaaggagaatttattaaagcactggttgtgggtcatattatagacaaaataaatcacaatatttgtttctcatttggacttgtttgaacttttcaggttaggaatcactggccaaatttcaaaagttattataaactacagtaatcaaacagtttggtactggcataaagatagatgtatagctgaatggaatagaattgagagtccacaaataaactcatacatctatggtcaattgatttctgacaagtgtgccaagactattcaatggggaaataataatagtttttttttgttttttttttgagacggagtctcactctgtcgcccaggctgaagtgcagtggcgtcatctaggctcactgcaagctctgcctcccgggttcacgccattctcctgcctcagcctcctgagtagctgggactacaggcgcccgccaccacgcccagctaattttttgtattttttttagtagagacggggtttcaccgtgttagccaggatggtctcgacctcctgacctcgtgatccgcccaccttggcctcccaaagtgctgggattacaggcgtgagccactgcgcccggccaataatagtgttttgtttgtttgtttgtttgtttgtttgttttaaacaaatgctgctggtaacaactagatagctacatagaaaagaataaagttgggcccctacttcacgccatacacaaaaattaattcaaaatggatgaaagacgtaaaagtaagaagtaaaactataaaactcttagaagaaaacatagatgtagaagtagaaacaatccaaatgtccatcaactgatgaatggataaacaaaatgtgttatatacatccaatagaatattatttggccataaaaaggaatgacatactgatacatgctacaacatgcataaaccttggaaaagaaacattttgctgagtgaaagaagccaaaagaccacatattatataatcgtatttatttgcccagagtaggcagattcatagagacagaaagtagtttagtgattgccaagggctggggactggagagaatggagatcagctttgtaacggatatggagttttttttgaggggtgatgaaaatgttctggaattataaagtggtgatggttgcacaatattgtgaatatatcaaaagccactgaattgtacactttcagatggttaaaatggtgaattttacctcactaaaaaaatgagtttaggaggttaatgtaaccttggtgaaaccaagaaccatttggcataatcgtggattttgtttttgtttttgttttttgagacagagtcttgctctgtcactcaggctggagtgcagtagcatgatcatggctcactgcaacctctgcctcccaggttcaagcaattctcatgcctcagccacctgagtagctgggattgtaggcgcacaccaccatgcccagctattttttgtattttcagtagagacaaggtttcgccatgttactcaggctggtctcaaactcctggcctcaagtgatccacccgccttggcctcccaaagtgctgaaattacaggagtgagccactgcacccagccaatcacggtatttaaaaaaattaatttaataaatgttcagtgattatcttcaacgtgctaggtagtgaatgaaatacatgctaataagatcaaaccgtaacagttgcaccccaaaatcttgagtttagaggaagaaaggactattaaataattaagttgcatgtggtaaatgtaacagaactgagtaaaacttgatctaaaagcacagaagaaagtaagaacaagtttggggaggggggagttgagaacgcccttctagagggtatatttgaatttgatttttaagaacagtttgctgattgagtggaagagaagctggagagtaggtcaacaatgtaaagaacatgtgcaaagtcaggagatgaaagaacaagccttattccaagagtgaatcatcatgcataccttgaggacttgtaaaaccaagctctacccagtccacaccaacccagacacaaatcaaagacttccgaacagactcccaacagggggaaaggattttaagtcttgtcagctcttacaaagctaagctaagccatccaagtcacagactacatgcaatgtattgccccctagagttggttatgatgttaacaaacatcaaattggaaatgaagtttaaagtcactagatggcagtagctacaaagcagatatttgtgttactttatcttttcagtattctagcttcaggtgttgaccacattttagggctcaaacctacaggagctgagagccaagcctgagggggtattggtcagttcctcagccagcatgcataggttacagctgatcacctttccaggtgctatatccatcatcacacttcttccaattagtactttcaccaagaacctgcaatgctaattcctgtttttgagtgcaggggaacctcattttcagagtatttactattggagtacctataattataagttgggaagcaaaggtcatcccaacacgaaatgttcactaacagaaccttataaagctagtctccactcacacctccctctggcttaacactggcatctactcccacccactattattgtcaggtgtttttactgtgattattatgctgacaaattgcaaggtgaaactgccaatctcacaaacatgaaggatttcactaagataatgaaagcaatggaggaggactgatggaataattattagaatgcctccaagaaatgagggtctggcagagtttgattacaattgaagaagagaaaattaacaaagatgatgacataatagagtcttcaaaaggggataattagaaattcaaagggttaggagaggtcctggagaaaagtgaagtccttgattattttgcaaaatttaccttctttaaaatcttgatatgaaggtcaaatgagaaatgatggatgccatattttgccaccttacaattttgttttttagaaaaaaagcacaccaaaatgagtcttgattcaacttcctgtcctaagaattcgtctatagttgcaatgataatcaaaagtggttacatgtaaaagaaaacaaatgtagtattataatttttagttcttttaaagctaaagcttcaatccacactctcccttacctccattatttgctgtaaaatgttgcttcccatttaagtggattcatgttaagtagacttttcccaggaataattatccttaaataggcttttttaaaattattattattatactttaagttttagggtacatgtgcacaacgtgcaggttagttacatatgtatacatgtgccatgctggtgtgctgcacccattaactcgtcatttaacattaggtatatctcctaatgctatccctcccccctccccccaccccacaacaggccccggtgtgtgatgtttcccttcctgtgtccatgtgttctcattgttcaattcccacctatgagtgagaacatgtggtgtttggttttttgtccttgtgatagtttgctgagaatgatggtttccagcttcatccatgtccctacaaaggacatgaactcatcagtttttatggctgcatagtattccatggtgtatatgtgccacattttcttaatccagtctatcattgttggacatttgggttggttccaagtctttgctattgtgaatagtgtcgcaataaacatatgtgtgcatgtgtctttatagcagtatgatttataatcctttgggtatatacccagtaatggatgactgggtcaaatggtatttctagttgtagatccctgaggaatcaccacactgacttccacaatggttgaactagtaactccttaattctaccttataagagcttacaaagcccactagacataaaagcatcatagaagtgctgctatgtgtttggttagtggagattgcaaacccgattccagactcactcatccagcttcttcctccaagaggaatgacattttcctatgatggctacatctgcttgcttcaaacttaaatcacagaaatgctgggatggctcataaaagctgccctctggacttcgtgagaaattcagctgcagagataactgtttgttcttccttcccttaacgtagtagtcatatttctgaaaaacagtacatgtaaatatttataaagtgagtctcattctaatcagttttgggagaagttccatgtttaaaaagcaagacttcttttttatgggagggagttgttaaagcaaagaatccctctgtttttggaaggggattatgaaaatccttttcttctcatccttaagttatagatatttaatacatttatttttaaaatcggattctctcctatcagtatgcaccttcattgtcccaagtgaggatatcttgaattaaaagtattaatccataaacatgtaccttaacaggcattggttggtattcatgataaatacttacaggtattatgtgatactgcagacggtggggaaagccccattgtctaaggcctatgctcctttctgaatctttggagatggaaaattagagatgaacatggagattccacattcatttatctccattattcaagcactaacttagccattcaacaaacatttactaagtgtctcatttgtgttctatccactgttctaggcacatgagattgtcagtgaacaaaacagatacagatccttgcccttgtgtagctaacattctagtgggggcagaggaatacgtatcaaacctaataagttgtatatgatgttaaaagagagtaagtactatggaaacgaaaaataaaaataaagcatagcatgaggactgggatttctttgtggattataatttaaatagggtgactggtatagatgtatggagaaagtgacagttgagcagagacttaaaggagatgagggagctaggcattttcacatctggggacgagtactccagcaaagggggatggccagggccagaaccctaagaggagagcatcctggtttgtcccaggaacatcaggaagactgatgtggttgaagtggagtaagtgtaagtaagagagaccaaaagcaaggtcagagatttaatgggagtgaagcagatagaacagggctttggaggtcattgaggtcactgtgaagactttgagagaaacggagaaccatgggaaggttctgagcagagcagtgacatgacatgactttattaaaagatcactggactgctacgttgagaatagattagagggggcaagggtggaagcagggggattagttaggaggccacttgtggtaactgagcggggaactgatggtcatgtaaacccaggaggaggcaaagaaagtagtaagatgtgattggcggtgaaggaagaattaacatttatcctgtacagtggcatgatcaagtggctgctcactgcagccttgaactcctgggttcaagtgatcctcccgtctcagcctcttggtagccaggactacaggcatgcaccaccatgtccagttgactctccttcttgatgggagaaaccgcaaatttacacaactatagggcatggaagaatttgttgccatcttcgcaatataccgcaggagggaagacagtgattatggatgcagatgctaataggtgggtcaatgcagttgtagtattatgggaacattatcttctcagcactttgatcttctcaaaagtagggtctcaagttcaaagtccacacaaggctgatgttgatttattcatttacaataaaagacaacactgccaagataactggggccttatggcagcttcctagagtctttagaaaaatgcttcctggaagccacctaatcacgaagtctgggattcctgcaaatgaggctaattggataaatgatggttgatgttatgaatcttgacagcaagatacactcatccttgaaaaggacattcttttcaagcagattgaaatacctatctgctaggcactccctgccctggataatgctacatgggtgcttctgggctctgtcttttgactgtattttctctgtgaaccagtgcctatgtccatccaccctttctgtacatttatatgtgtctaagagtaggcttctatgacaaaatatcacaggtgggatgactgaaaaaaaaatttatttcttatagttctggaggctgggaagtccaagatcaagttgccatacaattaaattcctggtgagggccctcttcctatcttgtagatggtcaccttctcactgtgttctcacatagtagacagaaagagagagagcgcgcgctcatgctctggtgtctcttcatcttttgcaagggtaccagctctatcagattagagtcacattcttatgaccttattcacagtccttatctctatatacatccttatctgtacattgtgggattatggctttgtattggtcagggttcttcagagaaacaaaatatagatagatagatagatagatagatagacagatagatagatagatagacaatttattgtgagaaattggctcacattattatggaggctgagaagttccacattcagccatctgcaggctggagaaccaggaaaaactgtggtgtaattctagtccaaacccaaaggcctgagtaccaggggagccagtgctgtaaattctagtccaagagcaggagaatattgaggtcccagctcaaacaggcaggtgggaaggaaaagagaggaatttctccttcctcttcctttctgttctattcagacccccagcagattaaatgatgctccctgcctcccaacatggaggaaggtggtccactgagtccacaattcaaacactaatttcatccaggaaactccattcacatttcttcttaaacttcttaaattggccgggtgccatggctcacgcctgtaattccagcactttgggaggccgaggcaggtggatcacaaggtcaggggatggagaccatcctggctaccatggtgaaaccctgtctctactaaaaatacaaaaaattagctgggcatggtggtgggtgcctgtagtcccaggtactcgggaggctgaggcaggagaatggcgtgaacccgggaggagtgagccgagatcgcgccactgcactccagcctgggcaacagagggagactccaactcaaaaaaaaaaaaaaagttcttaaattaaagcttcccttatatgctgatatgggcttatttggggcccagaagtcacactaagtcttttctaccctttcctgtcaagcttgttagcttcccaggaagtgtgtctgtatctttgagggtggagggtgggtgaatgtagatgcgaggaggtagggaggtagaatgagaggcaggggtgtttcccttgacggctttgtggggcttctgtgggtcttcagagactggcctcacatttctggcagcctctcagctgcagacaaatagctcctctgctggccatgtgagtctctcccccagagccctgtgagtgtaggtccctccagcttccatctgtctccaggtggatcttgtgggccaagtctatttaaattgtctctcccctttgcctcccacttcgtccatagaaacactccccatgctttggcttgacaaacccctccatgatccacagacactgcagactccaagggacttaggccaacttcctcaggagtgctccttgatgtcctctcactaggtttgatgtaggggcttgtaaacctacatgcttatctctgatggatatgagggcagaagtagggaggaatcataatataccaacagttctctccaaagagatcctctttctcttttccagcttgtggcctcttaaacgtcaacaacaaatgggaaagtggccaagagtcttggaaacagttttatataagtaccctagaaatgtcctaaacatgttctgaacatttcctatgctagtccagcatttcaccttaaatgtgacgctcagtatcctgggtgctcattttaccatcctgttacaggttcctatacagggatccaggagcttagctggtccatcgttctgccatgacaatatataggaatactttataattagcattaagaaaaataagaataattgcaatcaaagtatatcactgagttagtttttagtcttatcttgtgtctagtttgattcttttctttcagaccctgaaacaaggacttggatgcacagaatttatttggggagcgatcccaggaagaccagttgaggacagaggagaatgaggcagggaaaggagaaaagtccatgtagagtatgctaatgaatggttactgcgtggacagctagggctgcaccgcactgggaccctctaagagactgcatggaagatgctgcaaaatcttcccactagaggaaggcaaggctgcttcccatgtaatttgtggagaacttgcccccagtggtgttaattgcagccccctactccaagttccctgcatgcaggaggcagaaaagaagagagacactaggcacttgaggggttggaagacatctccagtgctgtggaacttaggtgggctgggataggtgggatattggacagggcataaacagcagctgataccgttgcacacaggccaggagaaaagtgatgaaaaaagactgcttgggtgtttctttctttgaatgtgtagattttcctatctcagacctctgtttcttctgcatttgcagtgcctccctgtagttttatgaaatttcagtgaccagaagttcctcttggcctgatgttacgatcaacacatgatttgtttcttatagtaaaaccaatttccgtcctgtttagtatgaaagtatgtgattggaaactagaagttttagaggaggagaagggagccaaggctagcataactctgagacatctgctatacgacataacctggccgaggagagtgagacccagctttggctcagtgcctctcagtggcatttgagattggcttctgttagggctcttttttttctgatcccggtagccttcatcctggattctccaatgaataaaactcccagaggcgctccagtgtctggcgtatgttgtcccttacaaggcccttcaaaaaggacactgttgttctcccatggccaccccagaggagtccaggtggattctcaagcacttgggagtcacagtcatctcaaacaatcacggtcacaggtaatctgaggcagaggaatgcctcgagagaaccacatattcttttcctcttattgcaacccattagggaccagttctctggggctgagtgggcagagtgcagcattggccattgctcctgagaatcggggatgtctgtacctgacctaggactgagctggcaagtgtgtgtggtaaggtaggagagtggcgtaggaagctctcagcctggcccacagctgaaggctaggcagtgaacaaaagcaaaatggaagagggaaaggtagccagtaaaactctacctgcccttgatgtatcaggaaaaagcacttgattagatgcaggtcccagctgggagatatgatgcttggcaagttacttgacctatctgtgcattggtttcctaatctgtaatatggtgaccatgccaccttccgggggttgctgaaagtatttggtgagactaaaggtatgaaagaggtttagcatgacacacaggctgtaagggtattttcttttactatttgaaatgaatcaagtaaaagctataagggattcttccttttgttgatacatgagtcattcatataatatgcatgagcaagagagatgtaatgggaagttgactgtcaaggcggggaaggcagatccaccagaggatgcagtttgtttgtaaagacagataacagaaatcagcagttatatttagtaaaaccataagccaaggggagagcagcatgttgtctatcaatattccgaggcataaaagcacagaccattcttgaggaggattgagtgttgagctgcacagatgatgtggccatagccaatcctggatagactgaaatccaggtctttactctgtaacttaatcatgacatcagttcatcaggccttcaatgaaaagcttcactgttagaatataggtggaatgcaaaggatgtattggacttcgtttctgcactcaagaatctttgggaaagcagaagtgtgaaacaactgggagttatttgcaatctaaagaacagactggccaggcatggtggctcatgcctgtaatcccagcactttgggaggccgagatgggcagatcacctgaggtcaggagttcgagaccagcctggccaacatggtaaaaccccgtctctactaaaagtacaaaaattagctgggcatggtggtgcacgcctgtaatcccagctactcaggcaactgaggcatgagaatcacttgaacctgggaggcagaggttatagtgagccaagatcacaccactgcactccagcctgggggatagagtgagactctgtctcaaaaataaaatacaataaaataaataaataaaaaataaagcacagactgccaattcaactgcttaccaggacccagcaggtgatgtagctaagcaagcaggccagttataagaaaaacaacagcataggtgccatgtaaatgacatttgaccttaacatcaactccgcttccaaattgtccagtgaaaatggaggcctaggattgtcagatcttttggttttatccaaagtcagaaatccaaatttttatacaaattttgtcaatttttgtaagctgtcaagtaactttaggaaattgcacaacattatcaggtcaaacaaagaggtcttcatctctctatgatcgccgcaaacacacagttgtgagtaggaaggttggggagctcagagacaaaggaagagagggtgggggtgagcatagtgtccagagcctgaaggatggattctgtgagctggcaggagggcaggtccccagctccctctgggcggaggaaagagtccataggctcatcttccctgtacccagttgctgcccaaggactggccctggcttggtcttcttctccttctgagcaactgtttccttcagagaaatggtggggcatggggaggatagtcttaatttgttttttataaaacaatatttagttgtaaaagtgattcaaggtgaaactttctaacttttagaaagtataaaatacttttttcacttcactcccatccatttctaagaagtaatcactgataacatttatttttccatatcatcctggaaatttcctaagcacaaaaaaccatatacatgattattttttcccccaggagacggaagaaagatgtgattggccactgaatggggagcagagtccccactctgtgcatttgtgcctgcagtgtctcctgcttggaaggtacttcccttccttctcatctcctttactgccttgaaagacacacagtgtggtggtcaggaacacagacccctgagtcagactttctggctccacatcctgcctctaccaattgctagctctgacctgtgccgagtttcttaaccttttcatgccatgattttctcatctgtgaaaaggggattggaagcagactctatttcgaagggctgtggggaggaatgaatgtgttaaagtatataaagggcttgcacaggatttggcacagagcatgtggtatgtaagtgtttactattgttattgttctcaaaggcccagcacttgtttccttcctagtaggaaaccattctcagtcatccctaatctttgctcctctctcctcctccaatttacctcttttaatgctaattatgccatctaaattggcacctaattatattgcctcacattatctcaacacctatcatacatgcaagcataatgctgactttttgagggcaggcgccatgcctttcactcctttgtgcccacatagaggcattgtgtgggcagatttgggtcaggaatgcaggtgtgagggcctccatgtctgtgttcggtctctgccccttattgcagaggtgagtgagatgcagcagggagcccggggcccagcagtttctcccctccagcacctcggataagtcgagatggagtgcctcccttgctctgagctgctctttatattccccagaagtcgctctgccaaaatttagagccaactgttttagaaactctcggcagcaccagggccctaagggcagcaatgctctgcacttcccctgatccccagggagcctctgagctcatctcagtaaaactttaatgcctggaagtcaattagagtgaattctcctgtaatcaaaagaggcaatgcttttattggaaaggtgcaaactggaagagaaagatgacagctgtgtgagcctctggaaagctaatggcttggactgggaacattatttcgacagagtcaccctgtatctaccaggcaccaagataaaatgagagggggtggggtggacgggggaacggattgtagggggccttaatgattattttcataatgtgctgcaaagttcccagagcatgttcacacatttgctctcctaaaatcacctaccagttccactatgtggaattactcactaattcccattttacagaggaaaaactgaagttcagagaagttaagtatgcaactggagttggaaccctagcctctccacttcttttcagaaagcagacctggctggactgaggcatgtggatgaggaagaggaatccctgctctttctaagcacattcttcaaaagcaccatctttttgttgcctgttgaaggaattctgaaaagcagttagagtaagtcatgtgaaatttatgacttgaacatcagtggacagatgcacgggttgtacctagctgttccagcttactactgttgcataacagctcactccaaaacttactgtctttgaacaaccattttagtatactcacagatctgtgggttagggattcagtcagggcagcgggtttctgctccatgatgtctggggcctcagttaaaaaaaacttttaggcaggggctggaatcttctaatggcccaactggctggaagtccaagattgctcattgcatggctggagttaatgctggctgctaggtggatgctcaactagggctgttgaccagagcgctacttgtggtctccccagcatcgcagtctcaggatgtctggagttcttatatggaggctggctttcccccagagtgagcatcacaggagaaccaggcagacttttgttgacccttcatcacttccaccttactctaatggttgcagcagtcacaaacctgcccagactcaagagaagggacatagatccccacctctcagtggtgccaaagaatatgcagccattgtttttaaaaaaccacatactgcctttttcctttatgtccttattcttttattctcctatgaccccatcagtcccaactttaggagttgtagtaggagtcagcaggtgctggaatcccgtcttggctttgccactcactagctatgtgaccttggacaagccacttaccccatccacattcctatttcctcatttataaaatcagagttgtaataaaaataaacttttagatatctcctgtcacttataaaatatctttaaagcctagcagtcttataacactctgaacggagttgttatgaggggagggaatattcccaagctgatggtagaactcttttgttgggcagaatcctggtgacaagacgaataaatgaggcgatggctttcagaaacaatggcagggagatggagtaagggctggacaggggaaagatgtgtgcgaggactacctgagacagaaagagactgcaaggtgtgtggagggcaggcatgagctgcagacggggagagaactgtaacaaggagggatgggggagcccagagacttgtgatggaggccacagggtctgtactggccaggaggtgaatgatggaattgcctaggctcagagaatgagagataggtgataaataaggaaggaagagtatttctccttcagagccctgtgtggctcagcccagggctagagaggcaagcagggagactggctggaaggatgttaagggcaggcatcaaggctgtggactcaggggaagtcacaggcaggcagggccagctttatgtgtgtgtaactggtgcagtcacatggggccctgcattcagaaagcccagtgctttaatgctctgttgtcaccattctaaaattcttaattatttatggacaaggagcctcaaattcccatttgcaccgggcgccacaaattatgtagctagtcctggaggcaggacggtatgactgtttccctcacgcttgattctgaggctgaactgcagactttgtgctcaaatccttcccaggatggcaaagtgagttatgtgcaagctctgcaaatgtgggctggagacagaaacagggcagtgaaatattctgctgctggagaagccagacaggtttgggatgtggtcctttattaagaaaacttctcctcaaggctgggcctggagcaagagggcaccttggctccctgagagagcagccccgggctctgtggcttcacagagcctgctctttgcatttttaaggtaagattcatcaaatttgatcaactaggcttcactgaagtgccagtgtccagaacgagtgtgaggtcgcctcagggatgaagttagaccccttcaggtcacatgggcaaatggtgtctcctttgtgtgatgcctgctcttaggagaaaagtcttggatctcagagtgtcttggggagattactactttcctcaatacttgatccacattccttgaggagtccctaagaaggttcaggcactgagagagagacagccctgtccctgtggaagaagctgtaagctagaaatatgggccccagacatgcttgtgccattagccagccttgcaagatgagtgaatcctgtaaaggacaggacaggtgtgtgtgtgtgtgtgtgtgtgtgtgtgtgtgtgtgtgagagagagagagagagagagagagaaaggcactgggagggagagaaagggaggaagaagaaagaggagggaataggggagaaaggagcgatgaaaagaggacaggacaggacaggaaagaggagagatggatgaatgcctgtgatgttaattttcccatcctcccttccaaagatactcagcttctgtcttttactgcgcattagtcactatgtactgtgtttggggtggtttcacattaaacacttgtgtgtgtgtggtaggcagagccttgtgtttctcaatgggatgtgtctctactggtcttgctgtagttgtccaggtgcggaaagaaacgggtaggggtacaaaaatgcaggggactgaattccaccttgacctgtcaaggggaaagtggtctcacagctggaaaatgacatgtggctctatagatccttgctccaagagactcagtacaaacctcaaacacaaagctgtgctctgcatggccaggctgcaaaaatcgcagggttaattgcaggacttccacttggttgtatcagtattgtatggatctgccccatatttcaatgcctccttgtcctttgtttgttcctctccaacatggttgatctctggctcattccccaactctactcccactcaatacaacaacaacaacaacaacacacacacacagagagagagagagaaggagggagggagagatacttgcatcttaaacctgattagcagcctggattgatttctttttacatcttcagtttcggggttccctcttctttcttgtggtcacctcactgcatcaccgttcataaagcctggtgggccactcagtatgtaaggcagaagcagggtctgtccagctcagctcacacttcaatggggaacacccagctccactgaagtctccattccatgtgtctggaatcattccctttgatccatttgtatctctctgaaactgatcattccactcctattcctgcatattcttcagttcctctttattagactggcctccctgacgcatctgctggctctgtcggcacttccttctggcagcagtgtggatggtgtggtgacggtccattgaaatggcctctagtgattctcagctcctagtattcatgcccatgtgtagtctcctcccacaatgaaggcagctgatctgtataactaacaggatattgtgcaaatcaaaaagtgtgacttccaaagctagacattgtggcttttgccttactttcttacatcacttgtataggacactcaaacagactgtggaaaggtcccggtagggagaaatggcagtttcccaccaatggccagtacaaccttgcctcatgagtgagccacctgcaaagcagaccctttagtcccaaccaagaccaactagctaacatcttgactgcaacctcaggagagatcatgagctggaggaacccagctaatccattctggaattcatgacccatagaaactgtgagatggtaaacacttatggctattttaagccactaagttttgaggtcatttcttacacagcagtagatgactaatactttaaacaacatgtctcttctagttttcaccatcccagcaaatggcaaatgcatttatgctgttgttcagtccaaaatccaagactcagccttgattatactcttcccctcacaatccacatcagcaaattatgtaagacagctttttcttgaaatggtttcacaaatctatctgcctttctccatcttcactgccatagctcacacccaagccatggtcacctccagcctgcactcctgcaacagtgtccccactgatcttttcatttttacacctgtccctaacagttgattcttaagacagccagcaggccgggtgcggtggctcacgcctgtaatcccagcactttgggaggccgagatgggtggatcacgaggtcaggagatcgagaccatcctggctaacacggtgaaaccccgtctctactaaaaatacaaaaaaaaattagccgggcgtagtggcgggtgcctgtagtcccagctactcgggaggctaaggcaggagaatggcataaacccgggaggcagagcttgcagtgagctgagactgcgccactgcactccagcctgggcaacagagcaagactctgtctcaaaaaaaaaaaaaaaaagacagccagccagaaagacatttttttaaaaaatccgaatatgtcatcctctgtttaagccctcctgtggctttcattgtatcacaaaactgaaatagtctgctgcagcctagtgaccatacataatccagcccctgcctacatctctgcctcatctcctactatgcttgctcattcactcaactctagtcacactggcctcctcactgcccttgaatgtgtttctgagtcaaggtctttgcatttgctcttattttcttggaatgttccctcccccagactttcgcgtgccttcattgaaagctcaacacgaatttcagccaggcacagtggctcacgcctgtaatcccagcacgttgggaggccaaggtgggcggatcacctgagggcaggagtttgagaccagcctggccaacatggtgaaaccccgtctctactaaaaatacaaaaattagccgggcatggtggcaggtacctgtaatcccagctacttgggaggctgaggctggagaattgtttgaacctgagaagcagaggttgtagtgagccaagatcatgacattgcactccagcctgggggacaggagtgtggctttgtctcaaaaaaaaaaaagctcagcacaaatttcacctcctcagaaaggctttccttgacaattcaatatcaatatctcccttttaccatctacccccttgtcctcaccactaaggtgccatattggatttagggttcttgggttgcaaacaacagaaaccagctctttcttatttaaactaaaataacaattatgggaaggtagggggagctctttagattgaatgcaatgttgaagagccagaaggaggcagatactagcagctctgaacatgttggtctccagatgaatagggcaccttcctcagtggaggcacccattgaagaatgagtacattcctagagaatgtggtctaagaggattatgagtgaaaaggacctgatggtcatggagcaagactgctctgggattcctcctttcctggtggttgcagagaaggaacagtgggaaagagggaggctgtagaaggatgactggtgtggaaactttcccaaagcaatgggactaaaaagatttagaaatgtgatcagcaggacttcattttaccctgttctcctgggaacaaatcaatgaggtgatcattatcttcaccagaggcccatttagaaattgaacatttttaaaagcacacagaacagaaggatttgtaatgtgtaagtttatctctaagtaatttctctctctaacttcctggtggatgaaacccaacacaagttagcttaagcaaaaaaggtctttgtgttttttgttttttaaatagagatggatagttctttcgtaaaaccataggactgtcatgatggtcaaaggactagaaccagaaacttaagagtcattagcaactcaaagagattctttcttttttggattttctttcaagctcccttatggggtagaggttgtcattaacttatagatgaggaaactgagacgcagaggttaagtaacttgccttagggtcacacttggctttaccttaatgataggagggtccttgtttgtcttgagggtttcagaatttccttgttcatttctctattactttctttccccattcaagtgagactcaagttgctgacacaggggaggtcaggccacagaggacccagtgtctattgaaactctattttatagggcacagtgagcacccttcctcagctcccaaagcctgttctttctagaagccttaacttaactaggggagttcaaagtcatgcaccttttgcctaggtctgaatattgaagaatggcctgaccactctggtgaaggtgacatggagcaaaaaacatcaaagctcaggggtgaagaggaatcatgaaggccatctaatgcaggggccacaaacccacacgcagcaggaaccactcaggtactataaaggaaataagtagcacagtaagaagagtggtgaggtctgtggctaatggtctcatctaaaacagccttccctattcagctctggcttcttgctgacattttggactcatactcaacattgttagattttctgagttttcaagagaagccagaagttttccccgctactttgtattgttgtgaaaattaaatgagataactcacataagttgattggaagatgtgtctggcatatggggtaagctttcagtaagtgttcatggctataataacatttcgcagatgtggaaaccaaggcccaaaatggtctcccccaagatcacatttattggaagatgttacatgacagcccaggatcctgaccctgggtccacagttcttccttcctggttttcctttcctgacccccaccccatccttgagccatcaccattgtcactgtgtagcatgacacattttaactaactatatgctgcttcaccactgtatctttcatatattatgtctgctgattccctactttcagagaaattttcctcccttagtaaatgaaacctatgtcaaagcttgttccagtaaaacaatccactgggttgttcgtataaaagcaatagctctgaagcagctccccaccctgccttattagctcggcagggctgtattacataatctcagacctttccatttaagtcaggggctcacccactgtttacccagggcccattaaaccattaagaaaaaaggatgccttagtgggccaggaagacttgtgcactttgttgagaatgaagctaatttcctcttgctctgtggaaacaaatgcgctttacacccagtaaaagttccaggaattctgcatcctgtagtggtccagatgtggtcccacagagtaggcagcagggactgtcatttcccccttagtactcccagttccaaacaggccagggttggcccaagttggtactttcatcttttgctcaatcccacagttctaagttaatgccatctccttttgcactacgtgtcagcttcattcggctcactggaacacctgaggctggatggggccacacttgtcccttgtggttttgtttgtctgtttttgtttttttctttttgctttttgttttgttttttttttttgagacagagtctcactctgttgctcaggctggagcacagtggcatgaccttgggatcttggctcactgcaacctctgcctcctgggttcaagtgattctcatgtctcagtctcctgagtagctgggactacaggtgcctgccaccatgcccggctaatttttgtatttttaatagaacaggattttgctatgttggccaggctggtctcaaactcctgacctcaggtgatccgcctgcctcagcctcccaaagtgctgggattacaggagtgagccactgtgccaggctctcccttatgttttttgaactggaattctccctgtggattgccctggtgctagattcatgcttggccttgggatggctactatggcactttgtctaaaaaatttgccataaatcagatgtctgctgctctttcctgagaccacggatgaggaatacacacacacacacacacacacacacacacaaacacacacacacaacacagaaacactgatgcctaaaggtaccaggaagatgggccccggaggcactggccaccttggtgctcaatgttgctgctttttcagtccttctctcctcacagtgctctgttcatattggagccaaattcaagccattttccaagtctgtttttctgaattacttggaaatgtaattaaagtacaaaagaaggcactctgaatttctccaacaggtcaggaagtgacattcctggataataagaatttccgtaatacatggaaagctgaactcagagaaggcttgttaaacatgtggttgatcagattagggtttttctgaattaggaagataaggaagaaaaccaagaaccacagcataaactgtagccttggaaactgtgtcatactagtggaaaatgcagacagacaggtagacatctacagaaagggcagacaaaggatttctcctgaaattgaagaaaaccaattacagggtttgttctgctaccgacaaacagagtgagatactgtgtctggtgttctgtggtatctcaccctggttttgatagaccatttctccactgtatcagaaatttcaggctctgtgtaagttgtggttttaaaaaaagtgtgtctctgactatctggtctcctttggctcagcttccacccccagtaagtaaatctctggttattaatttggtttccttggtagcatgatgttggggaaaagctgccctggatatcagtcaggactattttcttaaataaatgaaatgtttctgaatcatcaaaggtggggacaaaattctggatctgacctgatttatctgtaatcccctctctgccagaagcaaccacctccagaaaacccaaaaagcccccagaggtctctcttgagctcatatacacttgaaaccaggctacagtttataacacctcttcacatatctttccttatcctcccacttttctgatgatgtttagtttaccatctctgtatcacagactcagagaggttctgtgacttgcctgggctccgcagtaagagcgtattgcagctgtggctccatgaccgacatcactgaatcacagttgtctgcagtggttctgggtcttttgttgaattgcttccccattaacttcccttcctggagagatggttttagaaaccaatttgcctctggaggtgattccccttgtttctgccattcttttccctgagtgcagttttccatggttttcccaggatccatgtaatgtaaatgattctattctttcaatgtgagttggtatttttttttttctcaaagaaagcagaaagagatattttcattcacacctactgtgagttgtgcctaagttgatgcctcctccagcatttacgagcacccagcagcaagggttgtctgcacctctgagagcttcctcagctgtggggactaacactgagtcgctcaggttctccttctgcctggtcccctgggcctggtgctggtgtgggtgtgatgtgggccatacgtgagctgcaggcctgggttgaatctcagggtgaccacagaacaacaagcggctttctcttctgttgagcaaagaagctgaatgggcagggtggggtctgcactaagggggttttaaatttttgctggggaagccttgatgtgatctgtggggaaatgggagttgggagacttcccagtttttcagctaagaggcaacctgcccatatatgaatttaggactgtgcctgttagagaatccattagagaagacaaaggctggaggggtctgttagaatggttgagatgccagggacaagagcttgacttagagattggcagtggagatagagagactttggagaaacactatgcagacttggcagagaaatgatcaaatttttttggtgttttatgaaatgtgaagtctaaaagaatcatggaaggctgttttaaaccttgttagttatatctttatttttccatatggaagcccctgcctatctgtcacagtcttgtgtgaatgggatgacacagatctgcaaaggatggaccatggagatggcagtatctggaggactcagaagattcagaaagcactgactctcaaaacttgtgagcaccatacccagctgtgcctccttggtcaaaggaagcagtggtgacctcaccggagaaagcttacaatatctctcacaccacataatcaagtcagaaacacaggtgttgattagggaagaaaaaagttacatccacatggaattgcactttactacttagatttcaaaaatctgggaaccattcagtcactcattcactcttttcttcattcagcaaatactattaaatgcctacagtgtgtcaggcaccatgctaaattctggaaattcaatggtgagcaaaaccaggaatagtcatagccctggtgaatttacataacagaggctaatcaatttcacaaacaaatgcaaaactgtccctgggaaaagtgctatgaaggagagacccacagcgccctgaggcctgaggtagagaggatttggcccaattagaagttctttaaaggtttcccgaggctgacctttgaaaggctagaaggaggtaagtaaacatgatggggaagaaggttttaggtcgagtggcatgtgcaaataccctgtggcagtgacatggcaagcactaaggacagaaagaaggctgctgtggaagggcaaggcagagagcggaggggccgaggctggaggggacagggccaaagcacgctgggtccacaaaccacattagggagcttttctttatccttccttatcatgtttaaatttaataaaatcaaattatcttcatttcactttatattactttctgtttatgaaaagagttattaatttttttttttgagacagggtctcactctgtcatcctgactggagtgcagtggcgtgatctcggttcaccgcaacctctgcctcccaggctcaagcaattctcctgcctcagcctcccgagtagctgggattacaggtgtgtgccaccacgtccagctaatttttgtatttttagtagaaacgaggtttcaccatgttggccagactggtcttgaactcctcatctcaaattatccacccacctgggcctcccaaagttctgggattacaggtatgagctaccgtgccgaggaaaagtgttattcatttttaatgaacaggagtgacatacagattttaaaaagaatatatctaagaataaaaatagacttgatataaataaaaatagtaagttaatagttatacaggtgttcggtagaagtggcaaaaatggcaaacctggagcagagatgactgtggtggaagaagtgtgggttctgcaggaagcagatgtggtcatggatcctggcctctccaccaccagctctgtgatcttggcattgagcatcagttttcttgtctgtaaaatggggatagtaatacctgttgtatgtgggtagttgcaatattgcagaaggttccaacagtgcttggcacatcatagacaatcagtgaatgtatgttcttctaaaaggaaaataattttctgaaagcattgagaatagtaatattggtggggagaggctgaagatggtctgaccattcaaatattcctggtgagagatgatgcagatttaatatgggatggtggcaagaagagaaaagtccatggaggaggtaaacttgagctatgcctttgaaagaatggcttatctgctgattaatcaatatgtagagagaaagaaaaacatgcattccaagtagaagttacagagtaagctaagcgcagaaggggaagctccaaggcatgttgttgggtgatggagatgttccaatttgggtatcagtgggaaatgagtctggaaaggcaggtgaaggtagggccatattctgcagctttacttgcagagcaaagaggtgtgatcaaaaccagagaaaacacaaacaacactaacagtggtaatggcttgcatttgttgagcacttatgatgtatcaagcaatgttctaaagggttttcaaatattgactcttcattcccgtatcaacctcatgactgcctacaaattactaccatctacaacttacaaatgaaggaactgaggcatagaggggtaaagtgacttgttcaggtgatagaattcttatccagtgccaatggggagccctccgagtcttctgagcagccctggtctcagatgtggcgtgtacagggccagtggagcgggaggaggaatagcaggccaactggctagagaagaaaccatggcaacatttcagacaaattaggagggctggactaggaagtcaagagtggagtggaaacccactctttctcctttttgagtgatcacaacctactcagcaacagtaatttctttttgttttctctttagcttaacagaaatacttgtggatccaaatccatggtaggaggtctgattaagaggatttgcagagaggcttttgagaagttggatgctcactgctggttagaaactactgctctggaatgagccacactctgtgcagtatttgatattaaaatattctcctgattgcttctaattctacatataataataaatcactaccttctgagaaggaaggctcttattaagtaaaatgtctgtcattattcagagcgtctacatggatttgaatattgactgggtttgggtagggggacgggagaaagctgaattgctgggcatgatgagcaagaagaattagagatcctgggtgcaagtgtgggagagagaggggaagggttaagggagaagccaatgagattatatgatgcctggagctttggagtggggtgaccaaagaactgctaagatcaagtgtgcaatacaggtttagtatcccttatccaaaatacttgggacaagaagtaccttggatttcagatttttaaagattttggaatatttgcaggccggttgagcattcctaatctgaaaatatgaaacctgaaatgtttcagtgagcatttcctttgaatgtcatatcagtgctcaaaatgttgcagattttggagcattgctgacttcagattttttagattatgaatgctctaactgtatttgatttgaaattgtttgtatttctgtaatgcaatttctgccatcacctccccaggccttaagtctgctgcattcaaaagtgtcttgtgggaggtgtgagtagatgttttgagtgtgtaaaaactaagaaacagtcctcataagtatggaaacttggtttatgacagtatgtatattactgttctttgactttcaatatttctgccttcttatattttaattgtgtctcataacaagcatgtaactggattgttattttaaatccaatatgaaaacaatgacactggagagttaagtatattgaactttaaagtgattactgatatattaaaatatatttatactatcttattatgcttattatgtgttttctctttatactgcattttatggttaaaaaaattctaaacaatttccactcttttttccttttaaaatattgtggtaaatacacctaacataaaatttaccatcctaccattttaaagtgtaccattcaatatagcgttaagtacattcacatgtttgtgagatcaatctccagagctttttcatcttcccaaattgaaactctatatccattaaacaactcctctttctcccctcctcccggcccctggctactaccattttactttctgtctctatgaattgctaggtatctcatataagtgtaatcatataatatctatctttttgtgactgtattgtcactttacataatgtttaacaatcttcattcttgacttcttttccttttcttactaaaatttccttctcgacttgtttggaaaaagttatccactctatgtccacttgaacaacttgctcagcttgctaaagaagttgaacaatttgttgagcaagtgttttaacatgcctgcactaaaccaaaaccaatccaaatattaatcctgctgaattagaccagtacgaggatctgagaatgctttaattcttgttaacttctctcaacttagatgcttttgttatcccatattttatttccagcttaccttctcacccctcgaattagacattattctattagacattattactattgttaatgttattattaacttcagagtcagagtttgcttagctgtatcctcctattcatatccacctacgtttttactcaccatcccttcatgtgtctcagacttggcatttggaagaatttttcttctgcttgaagtatattttttaggattttcttcagtgaggatcttttaatggtaaatttttcttagtttttgtctgaaattgtctgtattttactgtcgttttttgaaatagttttttatcagcatacaagtttaagttgacagttttgggttttttcctctcaatatattgaacattttactctactgatttctgtattcttttattgatattgaggtatcagccaagaattaaattgccgttcattggtacacgatctttattttctctatggcagctttcagaatctagttgcctttgatgtttcaaaatttcactattttgcacgtagttattgatttaaaaattatttcactttggatttattgagctttttagattcaaagattggcatttcctaataattctggaaatttctccattgttataatacacttcgaatattgtttttatttttttctattgtttccttttagaaattcaattagacttgaattaggccttcttttcttttcttttcttttctttttttttttttttttttgagacggagtcttactctgttgcccaggctggagtgcagtggcgcgatcttggctcactgcaacctccgcctcccaggttcacgccattctcctgcctcagcctcccgagtagctgggactacaggcgcctgctgccatgcctggctaattttttgtatttttagtagagacggggtttcaccgtgttagccaggatggtctcgatctcctgacctcgtgatctgcccgcctcggcctcccaaagtgctgggattataggcatgagccactgcgcccggccttgaattaggccttcttaattcattctccatgtcccaacccttcttacttattttgcatcattttgtattcctgtgccatattttggtttaattttgttgtatttaccttttagtttactaactttctcttcatatatgtgtaatctgtttaacttgtgcattacatttctaaatcccagttgctaattatttttatttctagaaatactgtttctttaattttgaaattttctaagattattctttatgatctcttgtaccctcatgtttttcagcttttctattagtttttacattttctatctgttaattccagttcctaagcctttgtgttgtctattactttggctctcactcatgatgacttatttccttgtatgttttgtgactttgattgtaaggtgatatttttactaaaatcttatttgtgggaattgcttaaggtctgggtcacagtacaaccccttcagaaagaattcctgttggcatctgccagcctccttctaaagagagattttatttcttgttcaccttacactgtaggtggagccctttggtgctccagctttacacaataaactcctttaaaatattccactttagatggtccccaggctttctgtcctgcctcaaccttgtgcagtcatccaagtggaagcctaagatcttcagggtggggcacagatccttcaggtcaaagctgcttccaacactctcttccatccagaggtttctgttttctatttatctttagagtgcttaaatcatcagagctttttaaatattctaatttttaaacttttaatattttatccaatattttagttgttttactagcaagaattattcaaggtatctaactatccatactgatagaactgtcattctaggctcttctttaagcaccacagttttttaatataaaaaccattatctcatattactttctttgttagcattttgattttgctatatataattatatgtgtgtgtgtgtgtgtgtgtgtgtatctcaacaccatttatgtggtgttactgttgacttctgactgcaagaagagacagtgagcctctaattaacagacttgtgaaaaagctttttctcctgagataatatttatttattcaaaagtgtattcaaacgaatatagcaattaaaaacattttcttgtgataaaactgaaggttgagaatagtttctaaacataagattaaatgtaaatttaaatattgtttagaaaaagtgacatggtcttcaaacttacacctatgctacatcttataacttttcttttttctacttctataattataaaaatgccttttgatagtaattattaaactatcttgtagacaagtggacttcaacattttaatattgtctcctatataatgtaactaaaactctccaagcctcattaattaattttcatgtaaacattttgtgtgaaatcctggtccgtcacacagctctacatgttcctaaatttctttcctttgctgacaatgttatcaggctcactttgcctgcctcttctccctttggccacaggattattaataaaattccaaactctaacagattctttgtgttaaattaagtgttagaacgacttttttttttctatgcagcccataataaattcaatctacttgtatctgtcttcccaagtaagtgaaggcagaaactgtgtcttactctgtatgtctcctttgacccctttctccactaagtgctttaaaatttggtaaaaactcagtgtacctcagtgtgtctcagtgtgtgcgtgtgtgtgtgtttacatatatatgtatgtgtgtgtgtgtatacatatatatgaaacataagggaaaaaagagtcacaatccaagtttttgaactgagatgaaatctgctgttgaagccatctagctttctttcaggtgagagacagctggggcctggttggtgttcaaagtctggggaatcctttagatgacctctggccactcagctcacctctgattctctctcccttgggctacctgggctgccaatgacccaagcctgctaggggaccagagcataggtaaaaggacctgggtcaccggaggaagctggagggtgaatggtggtttgtcagcccttgatcatggctatgaggtcctggagaaatgaaaaatctgagactgtaagggggcttccaaggctcccccatcactcccccatccaggcaggcacagctctgagctcttctctgcagcaggattttgttccctccaattaactgtacataacaacaaggagtgaaaccaagtaatttaagaaataatttatcatattcagttcaccattaacagccatctagtgtttcctttgccctcttaaatgagtctttgttctgatgctcagctcttctgtgtattccataagcttttagtgagtgcttcttccccctccctacctctctgcctccctccttcctcctgcctcctgccttccttaagctttgaagcacaagtgtctttctggaagcagctgagccttctcccatccaacatcttttgtcccagttaataaggaattgaatattactttataagcatgaactccaggctgggtgttgagacatacagagagtaggatagtctttgccctgaaccagctttcagcccacccaggagatgaggctcattcaccaagaaacagggaggggaggaaggagcacatagtatttgtcagtgtcattggctgggctactgggggccaagaaaggtcagatcttgcagtgagaaaagctccctggaagaagaggacttgaaccagttctgaatgttggtgtggatttggaaaggaagtaaagaagagggcatctcatacaggggtccagcaggagcacagatatggctgtgggaataagtctctggcatgagtgcgggggagatgaggacagagaggtgagccttagccaggccagtgctcagttagtaaggccctttacctgcctgcttgctcttttgtctccactttgggatcacctggcctgtgagcctctttccttacctctagggtaaagggagtccaaccatccagaagaaattaggtggtgtccttagtgacgttttaggttttagagtctgtttctttcacgtgtctcttctgctgagctctgtgtatgtgagcccaggaggtcaaggctgcggggagctatgattatgccactgagctccaacctgggcggcagacagagaccttgtctgttaaaaaaaaaaacaagaaaaagaaaagaaaaaatgtgagtgtgtaagtgtatgggtgagtgtgaatgcacagctgagctctcagggacacacatcagacacttacgtctctggatttgagccacggcaacaggatctatagctttgagttgctgaggctgtgagaccctggaccctccactggggctctggtagcagctctgcctctacttcaaagcctgttaagctccctgatggaggaagatgggtctagggattgggagatcaggtagtctgggctttcagaggggctgaaagagcatccacacctgcccctccttttgagcaaagtcccaaagctctgggggcacaatgaagccttcatggtcagggtgtgctcacggcccatggtgctgacctcttctcagaaggcaacatcatgcggggtgttatagggaaggggtcttgctggtgtccaaggagcctagaggctaacaatctggattgcccagagcatgggtcacagatgatccaggagagtgagctaagcagggaccctgagggtctgactctctagacatctgtgagcaggcacacacactcacctcaaggcctcttgaatagtgtctgaaaggccaggcctcaaccaaaaaattaactaagatttctagtatctatttttaatttctaagattaaatataaaattgacagcaaactaaaagagaaagttacctttaattccaaattatggcaatctaatgagctggtgacatatttctttactaaaatttattttggagagggcatattatttgtttcaaagaaatactcaggtaaattgcttgatgagatggagagtaagatcccaagggcatgcatgcaaaaaattacagggggtggcatctttaagattggaaacagtattgaaatctgtttcattcctgagaggaaagatggcaggaaattgaggtgaatagatccaatcgagggtccagtagggttagaaggccaagagagatcccccctcttgctatgggctgtgcagtataaccctcctccgctctctcccctacagaaacactggtgagatctacgatgctcactaatgctttcctgagagcaggctctttgggggaccagaagccaggggccgcaagagtggatacaggtgacagcagagaaacaggcagctaacatctgcgctgcagataaaagggagcattcaaaagatggccacaggggcaggcaagcctggaggctttgattgggccaccttatgtgggaggtagattggggggtttgtgttctcaattttagagagagaactgagccttcttaagactagactttggcattaagcagttaacttaaggtggagtgaggagctgatcctgtgatatccaatcatgctgcttctcagcttgaacttcggttatcagacactgtctcttttcttatgcacattgtgaattcgtttccagaagcttttaaatttgttccagaaataccaacatgcactttctgcctagtcaggaaaaaacaaagcaagctgaaatgaccaaacacagggagcatcacaaggcaatcctcccttgactcttcaaagaacactaaactgcagcccctagaccacagggtcaaggatggcagcttcacagccaggtcaggcatgtgtgtttcttcctgtcactacaactcaactccctcactccctgtgttccctaaggaggggccgtgcaggcagctgatgtcacagcaggccgctgagattttgttcaaagcttagacctgttcatccctcttatgtgcttggtggtgctgcccctttaagatttttctcctccttcctccccagtaagggtaaaccaagaagaatgaagccagggtaaattgagaaaatatttgaagcctattaagagtggcaacaagtttatggtgattcttaagttaattatatcctttttgacttccagccagtcccttcgctgggcctccatgtagacttggccacctatcctagcctcagtctggcagcatgcctgcctgcctgcctgcctgcctgccttgttccttcccttcctccctccaaccacctcttccctgcaccctcctgcacaaataagtcagcaagccactgcagctactacttggggctcaaatatggtaggtaggggctgtgacgggcataaagaattggagtgtgtatgtatttgtatctgtgtgtggggtagggacatggtagctagtgggagaccacatatataaatactattaccacaaccatatgcatttattttcacatgtactttacagtttataaagtgttaactcctgatcatttaaatacatgaaaactttatgtagtagatgttatcagtgccattttctagatgaagaaactgaggctcagaaagttcaaaaggagatcacacagctattaggtggcagaacaaggtaggcttcaggccaggtctttgattctgacgtgtgtatgtgtgtgcgtgtgtgggtgtgtatgtgtgtgcttgtgtgcatgtgtttgcatatatgtatgcgtgtgcacatgtgtaagcatatgtgtgtgtgcacgtgtgtgtgcacatgtgtgttggggggaggcatgtgtgttttccctctacactacactggttcccaaataacaataaagttggacctttgtataacattttagaatgtatgaagggaagttttggcatactgcctcatttaatttttaaaacattgctataatgttgctatccccattagggttttctttagggattgcttctccctggtccaccaggttggcaggggcagctgcctgacctccatctctctggcctctgttgaggttcagagtcaggcccctgagccaggtggggccactcagtcccttccctaggaattttgtatctgggaatgagagagagcagcatgtaaacatggtggttgagagtgaacattttctgtcaggtgtactaggatcagagaaaaccagtgaacactgagaaaggagagcaaagaggctgtagactagcaacaactgcaagagacaaggagacacagacctccctgtatttcctacaggtcttcattcttcggttctactccatgagggtcagaagcttctctccccttgaattctgtgtgacacccctgttctctgccagcaagctttcttttatgcttatactagctagggttagcattctgttccaaaagaatcctcaatactgtatattagaattggaagcagagtgaactaaatacttagaaaaggtacaaggaatgaatagtggaagtcagaggatggagcaattttcactgttgcaggagctctcatgagttgggcgttgatgcctttgctgaatactgacatgtgtgagtagccctttgatgagccctggggaggggaaataagaatatgcaggaatcatcttttaggaagttgctcagtctagcaggtgcttgtgtattccctgccacattccagcagcccacctctgattccagctaaagctgtggtggacagttcccttgcatactgacagcatcccacctcaagagtctgccttgcttcacttggcttttctgtctcagtgctttctccaaagccatgggagctctctcagcccacaaacaagcatagcccagggatttggagatgggagggaaatgaactcctgaaaatagagggtctgcttccaagatgacttactcatatggctggtaagctggtgctggctattgacaagaggcctcagatgctccccacgtggaatctccgtagggctcattgagtgtcctcacagcatggcaactagcttcttccagagtgagcaatccaagacagcaagacaaaacttgcaatgccctttatgactgagcctcaggaattacacattgtcacttctccaatattctattgtttacacacgtcagccctgttcaatttgggatagaaccacacaagaaagtgaaaatcaggagatacggatcattgggctgccttggaggctggttaccatggcatctctgacaatagggaatgtaagccagaggatagatgtttcagcctcctaatattcaagtacattctatgtggttcctcagacagtctctagagaggctgagccacagttggccatatcagtaatcatctcaagtgcacaccctttattggcttctccttctcagctttccattcctcattccttcaatcctgtttcctgagatcactttccaaataaactcccacactggagtgcttgtctaatgcttctgggggaacccaaaccaaaacacaaaggcaatgtctaaaataattttgaaacatgaaagtatgcaatgcactgcataaacatggtcaagaaaggcttcacagaagccaaggagaataatagataccagaggctgggaaggatgtggagggcagtggtaggaagagagattggtcagtgggtacaaacatacggttaggtagaaggcataagttctaatgttcaacagcagagtagggtgactgtagttaacaacaatgtattctatatttcaaagcagctagaagagagaatttgaaatgttcccaacacatacaaataataaatattcaaggtgatggataccggcccagataccctgacttggttgctacacattctatgcatgcaacaaaatcaaatataccccataaatggataaaatattgtatagcaataaaaatgtacaatccttgctactctctcctcttaccttgcttcatcttttttttgtaaaatactcctacctcaaattacataatttatttgttttgtaatgaatgaatgatctataatgataataatgaactatgacattaacaaatgttaatttcctttgttatgtgaaactgatacacaaaatgatgtccctctggttcagatctctaaagtgaagtcaggaagccattctagggaggactgacgacctgcaaccttgcaaacaacaacaacaaaaaccctcagaaacttgcctcgaatttttgggttgggccaaacagccttgatggcaacgttctggaaagcagctgaatttcaccagcgctgcaacttctgaacagaaacaaccaatgatctcaggtactaagccagctgcctctaccagtgatatatattttttcaaaacaacttgcataatcatcctcagcttcttttttttttaattttttttaagggacagggtcttgttctgtcacctaaggtggtgtaaagtggcacaatcctaactcactgcagccttcacctccagggctcccatgagtctcctgccttagcctcctgaagtgctgggattgcaggtgtgcaccaccatacccaggcctcggcttccttttaaaaatgcatactcccctccctttctttggaacacaagctgacttctagtcgaatctgtgtcttccaaattgcaattcttaagactccaataaacaccttgtcatatgaaaaaaaaagaaaaagaaaggcttcacagaagcagcagaaattcagagattgggaaatgcgtgagaagaaaggcaagaggagagcactgcgactttagcaagactcagagtggccacaaggtctggtcagggcagggaacagagaagagcaagatgtggctggaacaggggtggtcaggatagggacagcttaccaggaggaaactggagcagactgtcgattgtgaaggccttcatgatggtcaagatgagaggtgagaagggcttgcactgggcgaagctggctggaaacaaaagatgggaatgaagaaaccagaccttacaaacgttgtcttacaggggcctggcagggcctccttcccaggaccagacatacaagattgaggagccagggctgggtctcagaaaggactatgaggaggttagcagttattttatttattcacaaacaattattaagcacctattaagtgacatgcactgttttaatcacggcacggcagtgaacaagatcatgaaactcttctcaatgagtatgctttctgtaaggatctactaggagtctccattagaaccctggaggaagtgcttcctagccacggattctgtgcttcctcagagctgtctctgaagaatcagtcacagccagttcttttggtttgcttactctcagtttccccacacaatgctctgttcactttggctgttcactcttctaagcggcactcatcctacactgaacgttgtccattgacatctgcttatttgcatggatgtcagcagtggcccacatcagggaaacagaagacttggtggttatgcctaaagtaatcgagagcttgagacggtgccagtatcatgcctgctgtgtgaatcaatacaaatttaggtttgaactccttggtggtatgcaagaggtattcaaggcatcccttcaactttgcctcctcttcttccatgctcctccttttggcaataccacatctccatgaaaccactagaggttgtctacacatgcttgtacctccaagcctgtgtgcccttgcacctgcttttcatggaaagcccatccccactttctccacctgttgagttcttagtcatcctctatgcttcagtttaaatctcacctcttctcggaagccataccagaacgagttgctccctgtcccattctgtgaaagcctctgtatcttacttgcagctccttgatgatctcttgcttttttatggttctttctcagcacacctgttctttctcatgcagcagatgcatgctcctaaagacctaaggtcttgttttaatgttttcaggatacagcatggtgttctgcagtagaggcggctcaatgtcatctttgctaaatgagcagatgggaggtgttgctgctgctaaagctgatgcaccttacctggccactgatgctgaagccagactcctcatcagacggcagaactgagactggcagggtcttgctgcctgccatcaccaagggacggcaatgtgctgtgtggctccaaggatgcaaatgtggggcgcctctgaacgtgtctgttgttgacatcctcttacaatgtggacccagcacaggtgctctgctccatttgtcagacacatgttttaatttcccacaggacagaaaagtcctgaatgcaaactccactcaagtgacctgtgtgtgtattattctttgtcacttaagtctttacacttggaatcatttgcatttaccttaaagatgaagctagaaagattctttgaaacttcaggaagtctgaatgtgacttaaatgtgacttaattgttcagaaaaaattgtttaattttttaaaatttttctgtaagttattggggtacaggtggtatttggttacatgagtaagttcttaagtggtgatttgtgagattttggtacacatatcacccgagcagtctacactgtaccatattagtagttttttaatcccttgcctctctcccactcttccccccgactccccgaagtcattgtatcattcttatgcctttgcatcctcatagcttactcccacatatcggtgagaacatacgatgttcagttttcaattcctgagttacttcacttgaataatagcctccaatcttatccaggtcactgcaaaagctgttaattcattcctttttatgtctgcatagtgttccattatatatatgtatctccatcatatatatatatatctccatcatatatatatatctccatcatatatatatatatatctccatcatatatatatatatatatatctccatcatatatatatatatatatatatatctccatcatatatatatatatatatatatatatatatatatccatcaaatagatatagtttctttatccacttattgattgatgggcatttaggttgtttccatgattttgcagttgtgaattgtgctactacaaacatggatgtacagattatttttttttttaataaagacttcttttcctctgggtagatactcaatagtgagattgctagatcaaatagtagttctacttttagttctttaaggaatttccacactgttttccacagtggctgtactagtttacattcccaccagcagtgtagaagcattccctgttcactgcatccacgccaacatctactgttttttgattttttaattatggccattcttgcaggagtaaggttgtatcacattgtagttttgatttgcttttttctgatcattagtgatgttgagcattttttcacgtttgttggccatttgtatatcttttgagaattgtctattcatgtccttagcccactattattattattattattattttattttttatttttagacggagtttcactcttttgcccaggcttgagtgaagtggcatgatatctgctcactgcaacctccgctccctgggttcaagtgattcttctgcctcagcctcctgagtagctgggattataggcgcccaccaccatgcccagctaatttttgtgttttttgtagagatggggttttgtcatgttggccaaggtcttgaactcctgacttcaggtgatccatcagcctcagcctcccaaagtgctaggattacaggtgtgagccaacgcatccagcccttagcccactttttgatggaattgaaagaaatcatagatgacacaaacaaatggaaacacatcccatgctcatggatgggtagaatcaatattgtgaaaatgaccatactgccaaaagcaatctacaaattcaacacaatccccatcaaaatatcaccatcattcttcacagaattagaaaaaacaattctaaaatccatatggatccaaaaaagagcccacacagccaaagcaacactaagaaaaaacaacaaatctggaggcgtcacactacctgatttcaaattatactatagggccatagtcaccaaaacagtgtggtactgctataaaaataagcacatatacctatggaacagaatagagagcccagaaataaacccaaatacttacagccaactgatcttcaacaaagcaaacaaaaacataaagtggggaaaggacagccttttcaacaaatggtgctgggataattggcaagccacatatagaagagtgaaacttgatcctcatctcttgccttatgcaaaaatcaactcaagatggattaaagacttaaacctaaggcctgaaactataaaaattctagaagacaacgttggaaaatcccttctagacattggcttaggcaagaatttcatgaccaaaaacccaaaagcaaatgcaataaaaacaaagataaatagctgggacctaattaaactaaagagcttttcagcagagtaaacagacaacccacagagtgggagaaaatcttcaccatctatacatttgacaaaggtctaatatccagaatctacaaagaactcaaacaaatcagtaacaaaaaaaacccaaacaatcctatcagaaaaataatttttttaaagagtctacatttcaaaaggccagggctctttaagataatggattcggagtcctcttaccttttcaaacacacacgttgcatttatgtaaaaagtgcttattaactctaagtacctctcttattctttggtcttctcttattctgggagtcactgtgaaaccaggcaagggcttagaatttttgattcctgcttcaaaaacccaagccatatgctccatgccaggccaggggctgatcccacgtctgtggtttcaattcctctccagaggacctgggtgttggcttagtagggggagaaaagcaaccaggcatttttcctcttaaaaatccacagatacttcgatttagtgtttgctgagtgtttttagagctattatcacatttgcttcttaacagtaaaaagatttgaaagaattatcatatttaacatggagaaaactaaggctcaggaaactaagtgatctttccaataacatgcagctgagaagtggtggagccgaaaccagtattcagcgccccttgtggcaggaccaaaatttcctgtttcccatcctgcactcccgtaagcacctacttccttgtaaacactcaccctgtaccctttatctcagctgactgtcagctagtctcctgaaggtgacaatagcttatggtgtgatactttccagggagacttaaattttccccaggaataaaaagcaaacaaacaaacaacaaaaaaaacactaagagcttacttgggggagttttgggttggtgacagtctgctgcagagttgtctggatgaccaaaagttctcttggcatccctatggccaccacataagcatgcatgttatcaatatttttctaggtctgaaccccaaggttaatggcacaagagaagagaaaggaggagatgccaaatggacaccctgtaagcaattccatgttgtgtgggcctcagtgggtcctgtggggggtgagaccccagaacactgggttaggaggcctgcagcttaagcttaatgcggaagcacaacctggcttttcacacagacttttctgtattccctcacccacttggatcaggccacagaaaaaaaaacaacaacctgtttctttattaatgatgctttctgcagagttagattaagcactgattaaaggcagatgcttccaaagtataaatgtaagtaccctctcagtcacttctccggttacagggtttcctacacaattctttaaaatcactttggctttcttcccatttgccttcctccacactctccacccagcctccaagccgctcctcccagaagggctccaggcagctgccaggagcagaagctcgaactctgctgagagacttgctctgtggagagcttcaagaagtatcgctgggattgctgtctggagccaccttaccaagaagtcaggtaagtcctctgggccgggtgcaggcctgttctgttctttcaagtctgggacctgccacctggaacttggtttgtttttctcatcagggtagagtacaggccttttgtgattattttctgatcaaattagaagcagagagcgggtacgagatatatggctcagctggtggagtccatcgggttgttctccctgctgtcaaatacactgagaggtcatgggctcacagggacaggagatggccagctggcctaataggcgcttgcaaccctggactttgtgccagcaattggaccttgctagaaaaggtcatctcaaatcttgtctccaactgaggcgatggtaaaaatcctccaaatattttctgaattccccgtggccaatttatttaatcagaaattgacatgcatgatttctttactgaagagctagcaaactaatcttgggattgactttgaattgagatcaatttcattaaactctgatcatgttcgtttgctttctgattttcttatgggatctatgaagagggaaagagatatcttttttttgtaacttacgttaataaatatggattatgtgtcaccaaagttaagaacttgttcaggttacacctaaaatgaatgaggaggttttctgtagggcatgtctaccattaagctgtctgacttgggtggtggatgagagtgtcatggtgaggccagtggaatgcccgtaggactgacatgtgaatgaggaggtggcagtgggttgaggtcctgggaggccacatcacacacagtgaggctgccatagacgcataccagcccagttggaagcttgtgaggctttctcctcttgactcctttctcccatctccttggggatatcttagttttaagtaagaagaactaggcacgtaggaggaattgcatggtggctaagagtataaggcctggaatggaattgtttcggcttgagattttccagcacttacttatgtgatcataagcaagttttctcaatttctgtaagacctaatgtcttctgcaaaatggggatgatgtaatcatgcccaccttgtagatttctgggggaaattctgaaagataatccatttaaagcatttgcccctttgtttagcccataattcataattcttattaacctcagtgtggacctctggcattccagattgtgtggaccagatctatgctgaaatgttccaggtgagcagttggaaacatcttgcgatttcccttactggttaggataaagtatgagaatcacagtatcagtttgctctttgccaaaagagaaagctagaaacaccaggcaaggaaggtataaggttaaagcctctgaccttaaagagaaggccataaataatccaccttcattctagatgaacatttctttcagatatccccaagaataatatatatctcataaaattgttttgagggttaaatgagataatgtatgttagttaacacactccaaatttcacctggaacagcatagacactatgaaatggtagctttctttatgaaaatgttcttgttatagggtttagtgaaaaagtcaccatttaaaattgttatacaggacaatgacagtcatatgaaatatatggacaaaaagactactgcaaagagatacactaaaatgttaaaacttgtacatattagatggctatggcttgtgggtaataatttccttttcctgatttctaaattgtatttagtgaatgactctatcagccagggccccagcaggaaacagatggcaagctcaaattggacattgtgaggatattttattaaagggactttttacaaaggtgtgggcagagtaccataacagaagcaggtgatggtgcatttctcaggttggtgagagtgaggtgccattacaccccacatcagaagaggcaagggaagggaggtgcgagccctgtagatgggcacctcacaggcactgtggcccatggccaccatcaggggaaagctggaagagaaatccctgccctcactctcccatcatattccgggtcacttgctggatacctctcaccaaccaaacccagccataagccagagtgtgagagatcccatggggggctacatgtgggtcagctttgcatcactgagcagagtggggaaggatggagagtgagctggagggcacagtgaggctatgtgacttttataactacaggcgaattcataaataagagccaggagtccgtgtgcagccctcagtgctttcacactacgttgcctattgtccaggccacctccctccctcctcccagctaaatgacttctgattcctcgtcaccatgccccactcagggctcccacagcacccaacaattgcctctggtgcagacgtacacatggcatggtttcatcctccgtcatttcttcacctggtctccacagattggaagaccctggaaggctggtgctttatatccctttgcatccccagtgcccagcacatgaatgaatgaaccatgggaggtcaggcctaagtgcttctataaagcttgcagctttggaaagtgaggccttagtcctctctcctaggtgagtgtttgctttctgtctattcggcaggagtgggccagtctacagaagagcagttgcagagttccctgtgacaggtagccctggccaccctgcaagactggcccctgggctcatgaaggtcttgcagggcctcctcactgctctcccaggctctgtcattccccacgtcaagtcgtaacccgcatgtggccggcctcccagtttaagactgcatgcaagttgagattctgcttgtttccttcatggcccaaggggattgggagcctgtcgtgcttgatatcttgtctctctagtttgaatcagaagatgttttcatcccctgaaggattttcacaatccttttgcaacctataaaagtaacacaagcacataattcaaatagcttagaaggagaaaatgttgagaaggatataacgttaaaagtaaaatgtctccactttcacctatgctcagtcccacttttaaccattttagtgtttaattctggtcattttctctctttaatttttttttaagttttatttttttctttgaactactatgcccagggactatttaattttcaattgacaaaataatcattgtatatatttgtagggggtctctctaactttaaattagcttacactgctatttcttgatttatacagtttgagtagaagtttttgaattgtccctatgggagatgaggaatttagcttattgatggtaatccttctgggctccccatgattcttccagtttttgttatctgtatttaaaatttggttttgtacttatctgtgtaattttaaggtataaacttatttttgtatggcttgaccaacctttcatagagtgtcttgactctctaaatgtttaaggtgagaaaattggtatctttaatcttcccttcactttttctctccgacttcagcttgtagtaaaattttataacatttatagcatttgtaatctactctataattataattaattctgctttatctttaggatgattgtgaaaattaaaaactaatagataacctgaattatatcataattttgtagctactattttccggaaccaagaactgtactatatttggacccataataaaggtaaaggaatggaccctgatgttactatctgctgcacattcaaggtcaaggtcaaatgaattatcttatttttcctgttatactgaaggatgttccttaccaaggttcctgtcaaaatggcagggtatcagggttcaaatcatttagttggctttgtctataaaccattacttttgaagtacgtcttattttgatggaatttctcattacctttcttttaacatttggaaaaaccattttctgaaacatattttttgttacataaaattttctttatagtttaaatatttttcccaggattctctgacttttctgtcagggcaattgcttctttttgtttgtttgtttttgcttttttttttgagacggagtctccctctgtcacccaggctggagtacaatggctcagtcttggctcatggcaacctccacctccagggttcaagtgattctgctgcctcagcctcccaggtagctgggattacaggcacgcaccaccacacctggctgatttttgtatttttagtaaagatgaagtttcaccatgttggccagggtgggctcaaactcctgacctcctgatctgcctgcctcagcctcccaaagtgctgagattacaggcatgagacaccatacccgggcttttgtgccgaacgtgcaggtttgttacataggtatacatgtgccatggtggttgagcaattgcttcttaagcctattgatgtgtggttgaccagaaatattttattgcactcttcggttaaggacataatgtcttggattccatgcatcctgcttttctgaattctcttttcattgtttgggagtatatactcaagtaattttttttgtaaagagtcattcagaatctgaaaattttatcttcaaatttgttagcaggacttggaaaataattgcacttagctaatttaattctttgatcaattttctagcaatgcaatctattttctgcacagaaaattttcagaattaagtatttctgtacaaatttcaccataagggtttgagtcatttcaaattttaccaattacagcttgtgccatattgattttctattaatttatcaattttatctattttgtggatgcagccttgattttcacagtcgaattttcctgagtttacttattaaagaatacttgattcttccattaattgttttttcagttaataaggaaattttactgcatactgcatgtggttttattttgtcagatttatttgagttcataatttttattcagttttccttttcctgggtcaatttttgcagttttcaatattactttcattttttttgggacagagtctcattctgtggcccaagctcaagtgcagtagagtgatctcagctcactgcaaccactacctcctggttcaagcgattcttgtgcctcagcctcctgagtaggtgggattacaggcacacgccaccacacctagctaatttttcatttttagtagagatgggttttcaccatgttggccaggctggtctcaaacccctggtatcaagcaatctgtctgccttggcctcccagtgggtgtaagccactgcacctggcctcaatgttacttttcttttcttttctttttttgagacagagtctggctgggttacccaggctggagggcagtggcacaatcttggctcactgcaacctccgcctcctggattcaactgattctcctgctcagcctcccgagtggctgggattacaggtgcatgccaccattcccagccaatttttgtatttttagtagagacagggtttcaccatgttggccaggctggtctcaaactcctgacctcaggtaatccatctgccttagcctcccacagtgttaggattacagacatgagccactgtgcctggccaatgttacttttaagatgtggttctttaggtgtgtgtgtgtttttttgtttttttgtttgtttgtttgtttgtttttttatcatctataacaaattttactgtgtacagtttcaggggttgtcagttttattttgtgttatatttatttttagcaagtttctctttcttaagaacccaggcaaaatatctcccagagtcaaaatggcagggtgaaagtgtccagttgcttctttaatcgccccattaggatggcagcacctgccactggactccttgctgtaactgagcatagggtccaggttttaccatccagggtctttcacagcgcatccattttacaggattgactagcatccatattgtgttcactgcaaaagacttatgctctgaattaaatgtctttcttgagctctagagtcaaatgcagcagagtctcattatatgcccacttcattcatacaaattcaattacacatgttcatgaggagggggaaattgaaatagtgcggggaattccatcatccagacctatcaataatgagcttgactctggatgaatgtgggacagacagtgatgaatctacagtcctacattcagtttcagctgacatatggctctcacagtattatcattgcttgccctaatcatagtatacttgaaggatcatacattgcctttatcatggccctgaaacacaatccaactactttgtttggggctaacctgaagaaagagtgtctggttctggccctggaagaaaagctggttgtattgaactcgtttaagtaatgaattgggatgcctcttcagtatggtgccttcctgagggagtttcaagagaaattttggctacatttctttgctttcacgctgttttcagagcctgacatgtgtgaactatgatttccctatattcgagtgccttttggttctctccacttgcaggttccccaggcagcttcagcttcgtgtgttgcaaaccaaatttattccctcgcagtgccctccttttcttgcactctctgtctcagtgagtggccacactgtcctctcatctgctcaagccaggaatctcggtaaggaccatccctcaagtctctctcttcccattaatctcatgtcaaggctatttattaactctcaaatccatgcatgtcattagatcatcccctgtaatttgatttgctacaagagtttccaagctcacttctctgattttagcctcccctttatcttcctatctcaagccttttcaatccccaacagttagagggactttttttttttaacttgtattttaagttcaggggtacacatgtaggtttgttacataggtaaacttgtgtcatgggggtttgttgtacagattatttcgtcacccaggtattaagcctagcacccattacttatttttcctgatcctttccttccttccaccctccaccttcccatgggcctcagtgtgtgttgtccccctctatgtgtccatgagtttctatcatttagctcccacttataagtgagaacatgtggtatttggtttcctgttcctgagttagtttgctaagggccttccagctccatccatatccctgccaattcccaatagttagagtggcttttctttaaaaaaacaacaacaacaacaaaaaaaaacaaatctgatagtgtttcgcctctgcagtaacaacaacagcaatgaaaacccaaacctttagtaattccccattaccctcaggggaagtccatgatctttaccaaagattacaggcctgcccactctctccctctgctgagtaaagccctattggccattccactccatgaaatccccattcctggcaaacagaaccagttgctggacatcatgttctttctcagctgagggttcctgtacacactatttgctctccctggagcatcctagtgtccccctttttctcttgtcctaagtcttacatctccttcaggtctcaatttagacattaaaggtttggacaacagtccctgattccctgttgagacgcctatcctatgatgagacacctatcctatgcatagacatagccccactacttctctctgtagtagcatttgttctattttagtttcctgtctttgtcttttctactactccaggacagtgtaactgttggaccagggactgtgtttcttcaccgttagtgcctagcaccatgcctagaacagacacagggcatataattgttgaaggaacaaaccagtgatatgttgggtttcttactataatttcctggagtgggtgtaagagtcagccctagattagcatccagtaaataagaaagaaagaggatggctggcatggggaaataggcattcaacctgaatactactgcttcttttcagtgtctagtttgaaccctgtggctgtagagaaagtcctcaaagaagctattatcctatggtagagtaaccctattaacaaaccctttctgcttttgtgtccggaattggtgggttcttggtctcactgacttcaagaatgaagcctcggactctcgcggtgagtgttacggctcttaaggcagtgcgtctggagttgttcattcctcctggtgggctcgtggtcttgctggcttcaagagtgaagctgcagaccttcgtggtgagtgttacagctcataaaagcagtgtggacccaaagagtaagcagtagcaagatttattgcaaagagcaaaagaacaaagcttccacagtgtggaaggggaccccagcgggttgccactgctggctccagcagcctgattttattctcttatctggccccacccacattctgctgattggtagagcctagtggcctgttttgacagggtgctgattggtgcgtttacattccctgagctagatacaaaggttctccacgtccccatcagattagttagatacagagtatagacacaaaggttctccaaggccccaccagagcagctagatacagagtgtcgattggtgcactcacaaaccctgagctagacacagggtgctgattggtgtatttacaatccctgagctagatataaagactctccacgtccccaccagactcaggagctcagctggcttcacccagtggatcccgcaccggggccgcaggtggagctgcctgccagtcctgcgccatgcgctcgcactcctcagcccttgggcggtcgatgggactgggcgccgtggagcagagggcggtgcttgtcggggaggctccggccgcacaggagcccatggagggagtgggaggctcaggcatggcgggctgcaggtcccaagccctgccccgcgggaagtcagctaaggcccggtgagaaatcgagtgcagcgccagtgggccgactctgctgggggacccagtacaccctccgcagccactggcccgggtgccaagcccctcactgcccgggccggcagggccagccggctgctccgagtgcggcgcccgccaagcccacgcccacccggaactccagctggcccgcaagcgccgggtgcagccccggttcccgctcgcgcctctccctccacacctccctgcaagctgagggagccggctctggccttggccagcccagaaaggggcttccacagtgcagcggtgggctgaagggctcctcaagtgccgccaaattgggagcccaggcagaggaggcgcctagagcgagcgagggctgtgaggactgccagcacgctgtcacctctcactttcttagggtcgaagtcctagaagtgagagagccggcatgggggtcgcagttcatgcctatgtttatggctcttttgttcccatttcatcacattttaagaactttactgactggatgtgagaaaagacccatgcactttcagttttgcttttgcaatccataactatggcccagtcaattccctgttcctttttctcttgtttgggccatgtggccacttgcctgctacttgcagatcccacttcagcagttcagccggctcagccttattgtcttgcttaatgtctgggtctcagttttagagactgggcttcttctgctcacttgttcctgaactcaacttcccgccttttgccaggtcctccaggaatgatgccctgctttggttttgtctatgccaaaagttcctgctatacccacagtggtggtcatctcttctgatcttcacagccaatcagctcccaaggcccctgacctcagctcagcttttgtagatccttatgacaccatcctttaagactggaatcctagggcaggctgttttattcccgcctcctgaggcctttctgaggatctgtggcttgtctctgtcctgagggtgaagatggatgacagatgctacccagtaatctttccagatgagcggaatttccgccccttcacttccgactctctggctgcaattgagaagcggattgccatccaaaaggagaaaaagaagtctaaagaccagacaggagaagtaccccagcctcggcctcagcttgacctaaaggcctccaggaagttgcccaagctctatggcgacattcctcgtgagctcataggaaagcctctggaagacttggacccattctaccgaaatcataaggtacttcattgggcggggggggggggtgggggtgggggtgttctaaccatgcagttgtaactggtgttacaggttctccaaacaccactcttagggtttatagcaggcaggctgtgcctcttctttgctgtcatcccctggcattgccttgatagtcctgaaaacccctttcagtcctcattttttctctgcaatgcatgtattagaggagaagatgaggatgagggactgcaaaaggataaaaggaaaacagagaaaacacaaaatgaagtctggaaagaggactggactagtagtcccagaagttagatacaggccatttcaattgattggctttatgactctgggcaagtcactttactaatcttcacttttaaaatctgtataatagaaataatgcctgatgttcctaccttagagcatagacatgctgggaaagcactttatcactataatgcattatactgatacaaaggattaatatcatggtccagaaatgctcattatagcaacaagattttaccttaaaaactcttggataataggctttctaggctattaaatgagactaatagggctcaaaccaacaactgatgcatagtaggagctcaataaatgaaacctaagaaaatggtaaccaagtgggcacatgcagattctatgtaaactcaatgcaaatatgtgaaagccttgctattttatctgcctggatgcagttcttgcagggaaattctagtaaaggtttcttgaaggggctcccgagtgagggaatgtaaactttgagctcccacatgactgctctagagcctgaggctgtgagcacacttggccctttcaggaaaggctcagaagattttgccatcatcacctcgcagtgtgatccagcagaggttggaaaccccaccttgccatactgaggttagagacctaggaggctgggaggtttggggaagccctagaaaatatgggatgctgagagcatctttggctggcatccataagaaactgacctttcaaagaaagattgcctgatttgcatgtacttcaattgggatagacttagagttgccaggccaaatgaggaccacatatacagaggaaagtagagtataagtaggaaggacaagcaagggggaaagaattgaaggagcaaaaacactccaatgtttctcctttttctgatgccccaggattccagggccttcttggaggtatagttgttggaggtgagttaactgtagaggtctccttctgcatcaatgctggagaggagacgcatgagtcaggcagcagtttggtgtgcagctgacagtccgggagaacaggactattccagcctgggtggtaattctaggaccaccacttctcagcctgggtcctcactttaaataagaagacacgatatctgtttagagctctgcacacccatgatctcacatgaccagtgccctcaacagtcatgtgaggtatgtgtgatcatgattagcactctaccttacagatgaggaaaccagagcctagctgggaaagtggcttaagccaggtcaagcagccagtgagtggtggagctaggatgcaaacccaagggtgctttttatcatcacaggctacttctctttggaagccccattttgaagagcaacaggggaaagaagtagagaagtgtcagcaagcaggcaggaggagctagtacctatcattttaatcattaaaaccctggcatgtagagttaaatacaccattagttaaaatatttaaagcagtaagaagaggcatcaataaaatatcaaaatcaaaggcacagaaggagagccatattgtaccacttattaatgtggggtgactcatctcaaagagaggtttgtttctgccccaaaattgtatgtctgttcaaaggaaaggcgcagaatttccaaagcaggtcttgggctcctggctcatatttttaaaaaaccccgtggctcatttcattattatgggggcaaagaaaaataccctagcacagttttccctgcagccagataaccatcagaccagtcaatcccagcagctcattaaaggaaggttgatggttggcagtggctgacgttctggcacctgagccaaggtagcactcacagtgctaacgttgggcctgggtgccgaggtctgtctctcctgcctgagaacatgctgtattacatggccaagtagtactttttgcaaatctgaaaggagccatcagttggggagaaaggaatgactcttactttctgaaggcttttgtaactgatagccatggggacagatatggggacagctagattacagttacatggaaaaagggaggtctggaggtggatgttagaagcatgttagtgacaggttgttgtccaggggctgcttcattcccagtgcccagggagtcatgctaggagaaaatgggcagaggttcagtgttctttaatgggactccactgggcactttgtgggggggcgggcataatgtaccattggcaagtttgtcctgtttggcatccctgggtcttcccagtaaaaggccggtagagcccatagtcattacagcagacaaccaaaaatactcacacacatttccaaatgccttctgtaggggcaatgcccacctcccctgctggttaagaaccacagggaaatttgcccctatgtccacagaggtaaagaaagagcaaatccaggaaacttggtgacttttttcttgaagatcatcaaggttagaattgactggttatttcacacagcatttctcagacctgtggcatagcaaacatggaccctttaggtcacttattctaagattcattgcaaagttttcgttaataatcaaaataatttaaaataatctgctgaatctaaatgtccaagctcaatttctgcctcttcaagttctcttctagtccctttccccgttgatacgtaccatggagtacaatattaagggttttcttttccccagttattcctctatactcctaattttggtattttcaggtcctgtgttttccatctctgattcttctggagtatcccattgggtaaatattccacagcccaacagtttatgttataattttctctaaatgaattcatgataaatattgttttgtcactgcatttaattcctgttgtgtatgtgtgtgttttcttgtattgttttttttgttttgcagacatttatggtgttaaacagaaagaggacaatctaccgcttcagtgccaagcatgccttgttcatttttgggcctttcaattcaatcagaagtttagccattagagtctcagtccattcatatcctttcattgcaccttttactaagtccagatcatttgaaaagtgcacgtgccccacggtgttcatgttattggatggaagcaaatagctaattctttctacaaatactggctgagtgcctactgctgcaggcagggactgtgctggatgtgagcaagatgtcgtctccttctctggggtcctatggcctcagaagggcatagactaaaaggcaggcaacttctttagtgagattggtcgtgtgaaagtggtagcagggagaggcactgctgtgctttagaggcatcaaggatggcttcttagaggaaggtgcatctaagctgacacctaaagagttgtaaactggcaacctgtgcagtatattgagttgataatgtgttgtgttggacctacacagtatttaaaactttgaaaaacactttctaacatgaatactccagatttccagcttttcttgaaagatggaaactggcaagggtaggttcccatttctgttaatacctgacaaaaatgggtagagtaaggaattgctgcctctttggagggggcatgtaagctctgtctcaccacctctgcacccctcttgtggctgaacaccagcccattttacccatttatatgccttttcaggctcttaaaacttagggtttgcaatgtcagtcttaaaatgtaaaggcaggtaggaattattaagcatttctgctgtatgccagggttgggggagacactaggaagttttagacagggaaatgagaaaaagatatgggttggtagatttagtaaaatattgaggagaatggcaatgaataactatttgggtttggttccctagaagcagagcctgatatgggcattcttatttaagtgatttaacagaggagtgctttctggagaaggagaaagggaagcagaaggggggaaaacaaagagccaagcaaggatatggtctcagctgagtcaccttcattctgatcccacgaagaactctggagcatgaattgcaccacagaattgtcccactttgaagcaagggcctaagtcagtcagacatgtagaagggggtgtgtagctctccaagtgaggaggctgccattcagcaggggacaattctccacaggaggggacagttgtgagttgttctcatccaacattcacagtcagaagatagatgcacctgcagaaaaggggaccatcaggggcacccccagtcttacccagtagctaatgatgcatgccatcctgcaacatatctgccttaatggatgctggccacattgttcagcatgttcattatcggcaccgttatcatcaactgcgtgttcatggctacagggcctgctaaaaacagcaacagtaacaatactgacattgcagagtaagtatttttccttcactcacctgtcctaagtttttaaacaaatatacctaagacagttaatgattacactggagagaaagaaaaagtcactaataattctaacacatatgttggcagaatcagttttatttttgacctttatttttttacaatttgtaatgaacagcacacatatgttcacattttaagtggttttctttgtgtttacataagttttataggtatccattttgatggttatataatattttatcaggtgaataaaccataatgtacttcaccactctagcattttagtagattgtaacattgtcataaaaatctttttgcataaagctgtatttatgtatttacttattctttgtttttgtttgtaaaaaattgttatgggagttcactatgccaaaaataaagctattctttttttatttttttttattttttgagacagggttttgctcttgttgcccaggctggagtgcaatggcactatctcagctcactgcaacctctgcctcccaggttcaagcgattctcttccctcagcctctcaagtagctgggattacagacgcctgccaccgtgcccagccaatttttttgtatttttagtagagacagggtttcaccatgttggccaggctggtcttgaactcttgacctcaggtgatctgcccaccttggcctcccaaagtgttgggattacaggcgtgagccactgcacgcagccctattcttaaattattattttcttgagatacactcttagaaatggattttctaggctgggcgtggtggctcatgcctgtaatgccagcactttgggaggccaaggcgggtggatcacgaggtcaggagatcaagaccatcctggctaacatggtgaaaccccatctctactaaaaatacaaaaaattagccaggcgtggtggcgggtgcctgtagtcccagctactcgggaggctgaggcaggagaatggcatgaacctgggaggcggagcttgcagtgagcccagtgagccactgcattccagcctgggcaacagagtgagactctgtctcaaaaaaaaaaaaatggattttctagataaaaaggtacattttaatgcttttaatgatatatatagacaaaatgttttccaaaaagtttgtatcaatttgctctgccatcagcagtgtattctaataaccaattatatcacattcttgctagcattaaattttttcttctctaatttatggagttaaaaatattagcatttctttaatttccagatgggttagacttaaaacaattttaattgacacataataattgtacacatttcagggtacatgtgatattttgatacatgcatacactgtgtaatgatcacttaagggtaattgggatatcaatcccaattggacatttattatttccttgtattggaaacatttcaaatcttctcttctagctattttgaaatatacaataaattattattaactaaatagtcatcccactgtgctattgaacactagaatttattctttctgtctgttttttgtactcattaatcaacttctctccattcctcacctctcacccagtctttccccatctctggtaaccaccattccattctctacctccatgtgatccactttttcagttcccatatatgaatgacaacatgaaatatttgatttagactcttttaatgttttcatttctgaattgtgtgtttccatctttgcttctgtatcatttttatttcttttctaatcagtttgagttctctgtataaccaaaatattaactttttatcatttgcattggcttttcagacatatgaattaatgttttaacttaaaagttctatatttgtataaatattttcttatcaaaagttccagtttttctagtttaacataattactgctttaatctttcaggaacatattgaatgcaaattgaataaatgagaccattttttctaactcctatttaattatgcaatataaaccactgcaatcgatatatagaccatttcaattaccccccaaaacgtctcatgcctctttgcagttaatccccgattcccactcccaaccccagacaaacatcgatctcatttctgtcattctagacttgttttgccttttttaagaatttcgtatacatttcatatgctatgtatgatactatatttttgtatctggtttctttcatttagcataatgctttgagatgcatccatgttgttgtgtatatttctacattttttttttctttttgttgctaagttggattccattgaatggatatagttttcccatttatctattgatgcacatttgcattatttccagtttagggctattatgaataaagttgctgcgaacacttccgtataaaaatcttttgtggatatttttgcatttctctgggataaatacctaggtgtaattgctgggccctgcgataagtatatatgtaactttctaataaactgctaaacctttttcaaattgacagcataattttacattcatatcagcaatatatgaaagtttcaaagtctttattaattttttcattcaatttgctttgattttaatttgctcttctttttctagcttcttaagttggaagcttaaatagttggttttagatttttcttcttatacaattgtataaagctatgcatttctgtccaagaactgctttagctgcattccacagatgtcaatacactgtgtttttattaccttttggttcaaaatattccctacattttctcatgatttcttctttgtcccatatgtcatttagaagtgtgttttttaatatttccaaatattttatacctttctagttgttttctggttgtctgattattatctaatttcagttcagttatgatcagagaatacactctgtaaaatttcaatcttttgaaataaagagaaacatcttttatagtctatcttgggaaatgtttcacatgcacttggaaagaatgtggattctgccacattcttaaatactccttaaaaggtcagttaagttaaggtggttgatagtgtcatttagatcttttgtacctttactgatttttacttagcatttttatgaattactgaaagagaggcttgaaatctctatctatgattgtggatttgtctgttctttctctctttttgtcaaatttggctttgtgtattttgaagcactattatcaggtacatacatatttacgatgattattattatcctcctgatgtattcattcttttattattatggaatgtcttctttgtctctaataatactcatttaaatatttgttttgtctaatattaatatagctacttcagctttcttaagctctttgtttgcatggtatatctttttccattcttttactctcaaaccttctgtgtctttgtatttgtagcgtatatcttgtaaacaacatatagttggtttttgctttttatgcagtctatcaatccagtctctgacttttgatgactaaagttcatttacatttaatatagttatataattggattttgctttgctatttttctattggttttctatttatctctttttttttttgtcattgttgttgttcctttgctactccattatttctccattcctgcttccttttgtgttaatcatgtatatttagtatttcattttaatcctctgctggccttttagctttacctatttgcattttttagtggtttcttcacatattaaacaatgcattgttaaattggcaaaatagagttaacgttgaattccttcaagtgaaacaggaaccatgccacagtttagtcccctgtttgttttttatcatatagttatgctaatgtacacaataaacccaacaatacagtttatcatttttgcttttaatgggcacatgccttttaaagacattttttttcctgtagatccaagttatcttttggtagtatttctttttagcctgaacaacttcctttaatatatcttgtggttcagttctgttggcaacccattctcagtttatattgatctgaaaatgtctttatttcatactcatttatgaagtagagtttcattgtatatagaatcagtgcttgacaatttgtttttctagcactttaagtatgtcatttccatgttttatgcctcctgttgcttagctctctcttgcatgcttccaggatttcctccctaaatttccagctgctctgccagctctgaaccccaccctcggccaccttaaatcttcaggactgcagccatttgccagtgttggggtgggagtggggaagttggaaaacactctcagaccaaaacagttaaacattttcataattcttatgcattgcaggtaccttcttttaaggggaaactctgccccagtttctgcctccttttgtttaccttccagggccttcaaataattgtccttatatatatattttccagtttaatactcattatctgtgggagggtttgcccagctacttcatgtcttcatcacaattgaagcaggcatcaatggtctcttaattttgcttattatttttttcttttcctttattaaatttaacaaactttcctctatgcccgtggattttgatttatagttagaaacactttctctagccttgagttataaaaggactctctcatattttcttacagtgcttttatagtttccttttttaaaaatttaaatccttgaataatttggaattcattcaagggtagggtgtcataaatagatctgacttcatagttccgtcccagatgtctatccatttgtcccaacaccatttgttaaatagtccacctcttatcctctgatgtgaaatgttacttaggtattcagatctatttctggactttcttttctcttccattggtctgcgttttcatatgccagaaccacactttttaactatcaagattgtctaatgttgtaatgtctaggagtgctagaggttccttttgagaatttttatggctcttgttgattttttcatgtaaattttatagtcaacttggttagttttattgacatgatgaaaggatttataaattaacctagaggaaactgacatctttatgaggttggaactcattgagaacatgacatatttttcatttgttaaaatcttcttttgtgttcctctaattgctttaaagttttcttcatacagatcttccacaattcttgttaaatttgtttgtgaattttactgttttttgttgccattataaatgtggtcttttctttcattatgccttgtaactagttgccttgttatataaaactatatatatatatatatatgtatgtacatcagtattatacatatcaatattttatatatatataaaattgtgtgctatttttgataaaatttgttgtcagcatttgtttactcttttgatgacttgtatggctcctccccatctttcccatgtattaaattttttttttttttgagatggggtttcactcttgtcgctcaggctggagtgcaatggcgcgattttggctcaccacaacctcctcctcccgggttcaagcgattctcctgactcagcctccagagtagctgggattacaggcatgcgccaccacacctggctaattttgtatttttagtagagatggggtttctccatgttggtcaggctgatctctaactcccgacctcagatgatccacccgcctcggcctcccaaagtgctgggattacaggcaagagccactgcgcccggccttgaaatgtttttaatagcatggaaatgaggtattctgggagaaagaaagagagaattatccagtaaagtgatttatatctgcaaatcttttggagagggatataaggaattagtgaaatgggaaggaattcatttattaatagctttttcatttttcattggtaatctttttcagttttaaaatttctctgaatattttgctatattcttcttctcatttatcattttgttcatatgttttcttttttctgtgattagaattgccagaggcttgcctatttttatgtttttttaaactatatcttaaattccattttaaaaactattctatagtttttctataactatgtcttaaattctatttgtcttaaattctatgtttttctaaaactatatcttaaattctatttatgtattaaattctatttttattttattagtattttttgagacagaatctcgctttcttgcccaggctggagtgcagtggagcaatctctactcactgcagccttcgcctcctggattcaggagattcttgtgtctcagcctcccaagtgactgggattacagacatgcaccaccacgcctggctaatttttgtatttttagtagagatggggttttgccatgttgcccaggtcttgaactcctggactcaagtgatccgcctgcctaagcctcccaaagtgctgagattacaggcatgagccacagcacctggccttaaattctatttaaaaatataatatttttggccgggcgccgtggctcaccgcctgtaatcccagcgctttgggaggccgaggcgggcagataacctgaggtcgggagttcaagaccagcctgaccaacatggagaaaccgcgtctctactaagaatacaaaattagccgggcatggtggcacatgcctgtaatcccagctactcaggaggctgaggcaggagaatcgcttgaacctgggaggcagaggttgcagagagcagagatgatgccattgaacgccagcctgggcaacaagagcaaaactctgtctcaaaaaaaaaaaaaaaaaaaaaaaaaaaaaaatatatatatatatatatatatatatatatatatatatatatgatatttttccttctgccttcttttattttcttcattatacattcaataggacataacattttctaaaatatgaatttgaatgtttagttcatgcattttccttcttttttgttttttattttattattattatactttaagttttagggtacatgtgcacaatgtgcaggttagttacatatgtatacatgtgccatgctggtgtgctgcacccattaactcgtcaattagcattaggtatatctcctaaagctatccctccccactccgcccaccccacaacagtccccagagtgtgatgttccccttcctgtgtccatgtgttctcattgttcaattcccacctatgagtgagaatatgcggtgtttggttttttgttcttgcgatagtttactgaaaataatgatttccaatttcatccatgtccctacaaaggacatgaactcatcattttttatggctgcatcgtattccatggtgtatatgtgccacattttcttaatccagtctatcattgttggacatttgggttggttccaagtatttgctattgtgaatagtgccgcaataaacatacgtgtgcatgtgtctttatagcagcatgatttatagtcctttgggtatatacccagtaatgggatggctgggtcaaatggtatttctagttctaggtccccgaggaatcgccacactgacttccccaagggttgaactagtttacagtttacagttccaccaacagtgtaaaagtgttcctatttctccacatcctctccagaacctgttgtttcctgacttattaatgattgccattctaactggtgtgagatggtatctcattgtggttttgatttgcatttctctgatggccagtgatggtgagcattttttcatgtgttttttggctgcataaatgtcttcttttgagaagtgtctgttcatgtccttcgcccactttttgatggggttgtttgtttttttcttataaatttgtttgagttcattgtagattctggatattagccctttgtcagatgagtaggttgcgaaaattttctcccattttgtaggttgcctgttaactctgacggtagtttcttttgctgtgcagaagctctttagtttaattagatcccatttgtcaattttggcttttgttgccattgcttttggtgttttagacatgaagtccttgcccatgcctatgtcctgaatggtaatgcctaggttttcttctaggatttttatggttttaggtctaacgtttaagtctttaatccatcttgaattaatttttgtataaggtgtaaggaagggatccagtttcagctttctacatatggctagccagttttcccagcaccatttattaaatagagaatcctttccccattgcttgtttttgtcaggtttgtcaaagatcagatagttgtagatatgcggcgttgtttctgagggctctgttctgttccattgatctatatctctgttttggtaccagtaccatgctgttttggttactgtagccttgtagtatagtttgaagtcaggtagcgtgatgcctccagctttgttcttttggcttaggattgacttggtgatgtgggctcttttttggttccatatgaactttaaagtagttttttcctattctgtgaagaaagtcattggtagcttgatggggatggcattgaatctataacttaccttgggcagtatggccattttcacgatactgattcttcctatccatgagcatggaatgttcttccatttgtttgtatcctcttttatttcattgagcagcggtttgtagttctccttgaagaggtccttcacgtcccttgtaagttggattcctaggtattttattctctttgaagcaattgtgaatgggagttcactcatgatttggctctctgtttgtctgttgttggtgtataagaatgcttgtgatttttgtacattgattttgtatcctgaagactttgctgaagttgcttatcagcttaaggagattttgggctgagacaatggggttttctagatatacaatcatgtcatctgcaaacagggacaatttgacttcctcttttcctaattgaataccctttatttccttctcctgcctaattgccctggccagaacttccaacactatgttgaataggagtggtgagagagggcatccctgtcttgtgccagttttcaaagggaatgcttccagtttttgcccattcaatatgatattggctgtgggtttgtcagagatagctcttattattttgagatacgtcccatcaatacctaatttattgagagtttttagcatgaagggttgttgaattttgtcaaaggccttttctgcatctattgagataatcatgtggtttttgtctttggttctgtttatatgctggattacatttattgatttgcatatattgaaccagccttgcatcccagggatgaagcccacttgatcatggtggataagctttttgatgtgctgctggactcagtttgtcagtattttattgaggatttttgcatccaagttcatcaaagatattggtctaaaattctcttttttggttgtgtctctgcctggctttggtatcaggatgctgctggcctcataaaatgagttagggaggagtccctctttttctattgattggaatagttcagaaggaatggtaccagttcctccttgtacctctggtagaatttggctgtgaatccatctggtcctggactctttttggttggtaagctattgccacagtttcagagcctgttattggtctattcagagagtcaacttcttcctggtttagtcttgggagggtgtatgtgtcgaggaatttatccatttcttctagattttctagtttatttgcataggggtgtttgtagtattctctgatggtagtttgtacttctgtgggatcggtggtgatatcccctttatcattttttattgcttctatttgattattctctcttttcttctttattagtcttgctagggatctatcagttttgttgatcctttcaaaaaaccagctcctggattcattaattttttgaagggtgttttgtgtctctatttccttcagttctgctctgattttagttatttcttgccttctgctagcttttgaatgtgtttgctcttgcttttctagttgttttaattgtgatgttagggtgtcaattttggatctttcctgctttctcttgtgggcatttagtgctataaatttccctctacacactgctttgaatgtgtcccagagattctggtgtgttgtgtctgctctcgttggtttcaaagaacatctttatttctgccttcatttcgttatgtacccagtagtcattcaggagcaggttgttcagtttccacgtagttgagcggttttgagtgagtttcttaatcctgagttctagtttgattgcactgtggtccgagagacagtttgttataatttctgatcttttacatttgctgaggagagctttacttccaactatgtggtcaattttggaataggtgtggtgtggtgctgaaaaaaatgtatattctgttgatttggggtggagagttctgtagatgtctattaggtccgcttggtgcagagctgagttcaattcctgggtatccttgttaactttctgtctcgttgatctgtctaaggttgacagtggggtgttaaagtctcccattattattgtgtgggagtctaagtctctttgtaggtcactcaggacttgctttatgaatctgggtgctcctgtattgggtgcatatatatttaggatagttagctcttcttgttcaattgatccctttaccattatgtaatggccttctttgtctgttttgatctttgttggtttaaagtctgttttatcagagactaggattgcaacccctgcctttttttgttttccatttgcttggtagatcttcctccatccttttattttgagcctatgtgtgtctctgcacatgagatgggttttttcctgaatacagcacactgatgggtcttgactctttatccaatttgccagtctgtgtcttttaattggagcatttagtccatttacatttaaagttaatattgttatgtgtgaatttgatcctgtcattatgatgttagctggttattttgctcattagttgatgcagtttcttcctagcctcaatggtctttacaatttggcatgattttgcaatggctggtatcggttgttcttttccatgtttagtgcttccttcaggagctcttttagggcaggcctggtggcgacaaaatctctcagcatttgcttgtctgtaaaggattttatttctccttcacttatgaagcttagtttgtctggatatgaaattctgggttgaaaattcttttctttaagaatgttgaatattggcccccactctcttctggcttgtagagtttctgccgagaggtctgctgttagtctgatgggcttccctttgtgggtaacccgacctttctctctggctgcgcttaacattttttccttcatttcaactttggtaaatctgacaattatgtgtcttggagttgctcttctcaaggagtatctttgtggcgttctctgtatttcctgaatctgaatgttggcctgcctttctagattggggaagttctcctggataatatcctgcagagtgttttccaacttggttccattctccctgtcactttcaggtacaccaatcagacgtagatttggtgttttcacatagtcccatatttcttggaggctttgttcgtttctttttattcttttttctctaaacttcccttctcgcttcatttcattcatttcatcttccatcactgataccctttcttccagttgatcacatcagctcctgaggcttctgaattcttcacgtagttctcgagccttggctttcagctccatcagctcctttaagcacttctctgtattggttattctagttatactttcgtctaaatttttttcaaagttttcaacttctttgcctttggtttgaatttcctcctgtagctcggagtagtttgatcgtctgaagccttcttctctcaactcgtcaaagtcattctccgtcctgctttgttccgttgctggtgaggagctgcgttcctttggaggaggagaggtgctctgccttttagagtttccagtttttctgctctgttttttccccatctttgtggttttacctacttttggtctttgatgatggtgatgtacagatgggtttttggtgtgggtgtcctttctgtttgttagttttccttctaacagacaggaccctcagctgcaggtctgttggagtttgctagaggtccactccagaccctgtttgcctgggtaccagcagcggtggctgcagaacagcggatttttgtgaaccgcgaatgctgctgtctgatcatttctctggaagttttgtctcagaggagtacccggccgtgtgaggtgtcagtctgcccctactggggggtgcctcccagttaggctgctcgggggtcaggggtcagggacccacttgaggaggcagtctgcctgttctcagatctccagctgggtgctgggagaaccactgctctcttcaaagctgtcagacagggacatctaagtctgcagaggttactgctgtctttttgtttgtctgtgccctgcccccagaggtggagcctacagaggcaggcaggcctccttgagctgtggtgggctccacccagttggagcttctcggctgctttgtttacctaagcaagcctgggcaatggtgggtgcccctcccccagcctccctgctgccttgcagtttgatctcagactgctgtgctagcaatcagcgagactccgtgggtgtaggaccctccgagccaggtgcgggatataatctcctggtgcgccattttttaagcccgtcggaaaagcgcagtattggggtgggagtgacccgattttccaggtgccgtctctcacccctttctttgactaggaaagggaactccctgaccccttgtgcttcccgagtgaggcaatgcctcaccctgcttcggctcatgcacggtgcgctgcacccactgtcctgcatccactgtctggcactccctagtgagatgaacccgttacctcagatggaaatgcagaaatcacccatcttctgcgtcgctcacgctgggagctgtagactggagctgttcctattcggccatcttggctccagcctgactgcattttccttcttgttgtaaataataaaaatatttatagggacaatgcttaggggtacagctttgtctctgtcttgtaggttttaatatgtggcatttcaatttttaatattttctaaatgtcttttgtattcttattttcccttcctctttggttcagtttcttgcagattcttctttaaggatgtttatagtaacatttgtggtatctgacttggcaagttgcaagtattgtactacatttcccacattagttacccttgtagctgtacttttcctttcagatcctctagtaattcaaagagacccactcaggttcaggcaaatataagaagcttcttgtgaatggaatggcttatctaatatttctaaaatgactggagcaatgacttactgtttctaaggcttgagggacttgggcgcagaggcaaaaaatcactcccgctagaggtatgatggtgaaagctggctagcagctgtttgtacctctggtggggagtaggactggggactcccagaccttgcaggcacttattagggaatacaacatcatcaggaaagggactatgtgaacaaggttggatgctccaaggaaaaatggattgatgaccctgggaggctttcctcctggaatctgggcaatgcccactctcgtcatgcttctttagaacatgttcttattttcaaatgttttcatagattttaaatgggaatttgggaaggcagtctccagtcacttccaccctacctttttcctggaagtgttctctaaatcatgtacacatctattctcctttacttggctctagtggtttctgggacaccggttagtggtcagactttgaaaactgccctttctttgactacaaggtctggtttggtctatatgtctctggagaattcttctcccttctaggtggtgtctttgtagggactgtctgtctctgttgctgggtggaacctggaacctggttaaggctggccagtggaggggctgtgccttgaggagggcacagatagccccaggaataggtgccatcctggcaatgtccttggggaatgtggtctcccctttggagatttggctgttgcatgaggtgctaactgagtgcaggggttgctactcgttgcttactgcagcttccctggaagcctttgatgaggagggcaggacctatggaggagacagatcaggagagtgcattgtttccacagctgcggtttgctctgcctagcccttgtggtgagatgcaaggagccttctttctctattatgggaaggtaatttgctctgaggccattttcactattaaaatacccataaggcagggaggaaaacccctctttaagcagagaggcaggagtcaagtgtggggaaagctgttgctctcccctggaagttttggatgaacagtggatacgtgaatgtggggtgggaggaggctgttaaaaatgtcttcatacaaggaggcatgtaatttcctcctggtgggcatggttttactccacatcagatgtcattttgatctgcctgtcccatcaatggtcaggcttcagctggaaaagagagaatggtggaagtaagaggtgggagactagaatgtcaggcagaaacagcagcgacagtctgctgtctcatttgcttaagatctgtatgaagacttgaaaaatcccacaaatctgcaattgcagatttttatcaaagcatctataactttataatttaaaactggtattaaaagatgttgcctttttaaactcttttaatgcctgtttatatgaggacatttttaacaacctcctgcaaccctacattcacacacacatattttaggacagacattatttaatctgatatgctcatttgtcacacaaaaggtgagcagctcagaaaaagcctgaagcaaggaggagctcttgcctgtagcagcctcatgaccatttctgctcttggacttggctgctttgagttttttcaagtcctcaaggcctttgttctttagctttcagggctattatgactggatagtttaccagaaaaggtccacttcttttactctgaactgataagctgtttaactgaattgcttgtttctgtcccaagtgagcgtgtgtatgtgtttgtgcttgcagactcagtatttttgcagcttgggattataacaaaagatacgagattttttttttgagacagcagataaaaagggaaataaattagagaattatcttagtcaattttatgttgtgataacaaaataccacagactggataatttgtaaagaatacagatgtatttcttacagttctggagactgggaagtccaagatcaaagggtctgtatctggtgagggtcttcttgctgcatcatcccatggcagaaggcagaagggcaaaaatgtgcacatgagagagcaagggtaaagaggcctgaactcaccttttatcaggaacccactcctgagatattggcattaatacatcacaaaggaagtgtcttcatggcttaatcacctcctaagggtcccacctcttaataccataataatgccaattaaatttcaacatgacttttggagggaacattcaaaccatagcaaggatagaatatgatggaagattcagggaagagaaaggaagggcccagtttttattaaaattgtgacaaagtacacataacataaaagataccgtcttaactattttaagtttattggaattaagtgcattcacagtgctgcacaacattatcattattcatctccagaactcttttcatcttgcaaaactgaaagtctatatccatgaaataccaactccccatttcaatcttcccctcagcccctgcctcatataagtggatcacacagtatttgtctttttatgactggattgtttcaccttgcataatgatttcaaggtttatacatgttgtagaatgtggcaaaattttcttcctttttcaggctgattaatattccatcacatgtatataccacattttactctgaactgacaggttgtttgactgaattacttgtttcagtcccaaacatgtgtgtgtgtgtgtgtgtgtgtgtgtgtgtgtgtgtgcgtgcacagacccagtatttttgacagtgtgggaatataaaaaagatgtaagctattttctttttttaggagattgtctacttatctggcaaagggcatttgggttgcttccacctctttgttattatgaacagtgctgctatgatcatgggtaggcaaataagttcttgagaacctgctttcaattcttttatacatatacctagaagtggctttgctggatcatatagcaggtctatttttaatttttgaggagtcttcatactgttttccatagggattgcaccattttacaatctcatcaacagtgcacaagtgttcccatttcttcacatcttcatcaacacttgttattttaggttttttaaaaaatagtagccatcctaatgggcatgaggtcatctctttgtggttttggtttgcatttttctaatggttagtgatgttgagcatcttttcatatgctcgttggccatttgtatttcatctttggagaaatatctattcaaatcctttggtcattttttaattaggtcatttaattttttattgttgagttgtaggagttctattttattttattatttaatttaattttattttactgtaagttctgggatacaggtgcagaacatgaaggtttgttacatagctgtatgtgtgccatggtggtttgcttctccatcaacctgttatctaggttttaagccccacatgcattaggtatttgtcctaatcctctccctccccttgctccccacccccaacaggccccagtgtgtgttgttcccctccctgtgtccatgtgttcttattgttcaactcacacttagagtgagaacatgcagtgtttggttttctgttgtcagagttatttacatattctggatgttaaccccttgttaggtatatgactttcaaatttttcttctatgagttttatgtttttcaggtcttacatttaggactttaatccatattgagttaattttttatatggtgtaagtaaagattctaacttcattttttgcaagtggagattcagttttccctttaccatttgttgaaaagactgtcctttttccaaggacattgccaagactattccatagtcttgtcacccttgtggaaaataatttggccatatatgcaaaagtttacttctgggctctctattctattccgttggtctatatgtgtctttatgctagtaccaccttgatatggtttgtctgtgtccccacccaaatctcatcatgaattgtagtacccataatcctaacgtgtggtagagggccctggtgggagataattgagtcacggcgagggtttcccccatgctattctcgtaatagtgagttctcatgagatctgatagtttcattaggggctttccccttcgcttcactctcattcttctccttcctgctgccgtatgaagaaggacatgtttgcttccccttccaccataatggtaatttttctgaggcctccccagccatgctgaactgaactgtgagtcaattaaatctctttccatgataaattaccctattttgattactgtagctttgtaataaatttcgatatcaggaagtgtgagacctcacaatttgttttttttcaagattgttctggctatttggggtcacttgaaattccatatgaattttagaatggatttttatatttttgtaaaaaatgtcattgggagtttgataaggattgcactgaatctgtagatcaccctgggtagtacgatatcttaacaatattaaaccttccaatccatgaacacaggtatgaaaaaattcagctatttgcttgtcatttactctcttcattgttctgtcaccattgtctccttctgtacatcagagtgacagctctagaatggtggtgacaaagtacaacctccagtgcttgggtctcatgttacctgaaactattctcaagaatatggacataaagctaggccttgaaatgcagcttcacaatttatctctgggcctgtttctctgaaattctaaataccaggacttgcttaaaaagcttgcatttttgaactctggtttgctgaagaccagaatgttaaatgtcacattgaaatggaaaaaaaaatcaaggccagtaagatagaagggctctttgcttttcacattgtttatcatgtttcttcctgttgtaaatgatttgctttttaggtgtgtcttcactgggatttatatttttgaagctttgattaaaatattggcaagaggtttcattctggatgagttttctttccttcgagatccatggaactggctggactccattgtcattggaatagcgtaagaatattaaagatgtttttgaagagacttggagtgggaaagaagcccctttgcttccatcagagctctgtgtggatccatttgagtggctgagtatggcctagtaatgcctagagctctgagtgctgtgttggttggccctgaacagcacgtgcagccaattggccagaggcccccacacacaaagccatttctaggtcaacactcaagttcgtgttccttcagccatttactcaccaacactggcctgttatgggccaggctctatggaagatacaggggtgtgccaatgaaattaaaaaaaaaaaaaaagacatggttttcaatcttatgaagctcacagtccagaggggaaaagtaacaattaatggccctgaaaatatggtatgatgagtaccaggataggggctatacatgtattaagctgtcagagaatataggaagaacaaagcagtctaaaaaatctttggctgctacaaggttacaaagagctttactcctgtttacttctagaagttctgtagttttggcttttatgtttcagtccatggtccattttgagttaattatcatgtatggtgtaaggtgaaggttgaagctcttcctgaaggaaagacactgatttggaatctgaatgatgaaatggagtcagcaaaagaaaaaataagaaatgcagtgacacattgccagcacaacaatagtaaacctggcatcattcaatatgtaccaggcattatgttaagcactttgcatattttttcctatttaatattcacaaaagcccttggaggtaggtgctagtaatttcagagttttacatttgaagttcaaagattgtgtgctcttcgttattgaaaggtggtgaagcacagtggtttagagtatggctctggagctacactgcctggctacacattcaggcttgaccatgtagtggcaggagactttagtgaagtgccttggggcatggaacttgtcagccactcagtaaatatttgagaggacttctattattcatggatgtagccacaactacatgaactatttcaaggagtcttcatctgtgtccacgtatgaaggtgaactgagaacagcgtcctctgcagttcatagcaagaacagtggtattgccagatcctaagataaaggtggggctggaaaggtgaggctgtcgatttcaccttggaggtcacaggcctcaggctgagcttacttgtggcttttgtggagatgtgcagtgcagctgcaggactgagcaagcccatgccttccctgtgctttgtcttgtaggattgtgtcatatattccaggaatcaccatcaaactattgcccctgcgtaccttccgtgtgttcagagctttgaaagcaatttcagtagtttcacgtaagtcactctcactttccacactggctcctatctagaaagaatgttaatttatatttaaattttttcaaaatgtcatcatgtaaaccaaaaacaaacaaagcctgctttacaaatttatttgatggtccaactgataattattgagcacctaatatgtccaggcactgtgctaactgcttgagatctagtagtaagcaaatggatacggactcatggagttttaccttctatggtgggggtggggagacagacacgaagcaacaactataataaataagtacattatgtagcatgtgagcaagtgctatgtgccagggaaaatataaagaaaaagtagacaccatgagggctatgggaagtcacagggtacaggggaaggaggttgcagttttaaacagagtgatcacgatagttgtcattgaggtgagaggtggcagagatttgaaggtggcaagggagtgacacaagcagatatatgggaaagagtattctgagcatgggaaacagccagcacagagattgaggagtagcaaggatgaggatgggactggaaaggagagggtgagaggccaggtagaggtgggatcatagaagtgaagggggggccgggtacagttgctcacgccagtaattctagcactttgggaggccaaggtggggagataacttgaggccaggagtttcagaacagcctggccaatatggaaaagcctcgtctctacaaaaatacaagagttaaggccaggtgcagtggctcactcctgtaatcccaacactttggaaggctgaggcaggtggatcacctgaggtcagaagtttggtatcagcctgatcaacatggagaaaccccatctctactaaaaatacaaaagtaatcaggtgtggtggtgcatgcctgtaatcccagctactcaggaggctgaggtgggagaatcacttgaacctgggagagggaggttgcggtgagcctggatcgccccattgcactccagcctgggcaacaaaagcaaaactgtctcagaaaaaaaaaaaattagttagatgtggtggtgagtacctttaatctcagctactcgagaagctgaggcaggagaattgcttgaacctgggaggcagaggctgcaggctgcagtgagccaagattgtgccattgcactccagcctaaggtctaaaaaaaaaaaaggactgaaggggagtcttgtaggcacagggaggatatgcgcttcactctgaagaaatgggagctgttgtgtggagaatggaatgtaggggagatgggagaagcaggaagacctcctgctacagggagcacagtggactaaagatcccggcttccacctctctggattccccactgcattcatccacatgccaagatcatgcctgccctgcacagtgtgtgtgggttctagtgctggcccattcctgaagcatatgggattcttctaataggaaactttggctcagggactctccagtgacctggctgagactccgacagctgcactgcagtctgaggttcttcctatccaatcctcctcccttgtctgtctctcagacatcaaacttgagctgcagtctgaagtttctccctgcccactcctgctcccccgactcatctttcacaggcgtcctcccaacccccacaaatctctggcacatctgatctcagaatgtctgctcctcaaaacccaaactgacacaagagaccataatccaagcaagggatggcagtgctctctgatcaggtagtggtagtggagttggtagacactggtttgattctgtgtcaattcaaaggtagaaacaatagcatttcctgactgatcaattgtatacatggtgtgagcaaaagagaggagtcaaaaatgacttttatacctgatgtcactgattgagacagagaaggctgtgagaggagcaggccttggggtcagattacaagctagctttgaacatgttatgtttgagatggctgtgagaccaccaagggaaaggattcagcaggaaattaggtatatatgagtccaggagtccagggagaagtcagagctagagataccatttcaggaatcaagggtctatagatatttaaagccgtgagatctaaagagatcaccaagggaataagcactgatggagaatagaagaggaccaaggtctgagccccagggtactgaaacatgaaagggagaagaggagaaaccagggaaggagatgagcagcagccacctgtgaagtaggaggggaaccaaaggtggtctcctggaagccaggtgaggaagtcatgttagcccttcggatcaggatgaagccaaggttgggtgtgaatatgaatttctgtttattaaaaatgaggttattatagcacacccttttcctctccttcccctttcctctcttttctttactaaaacaaacaaacaaaacagtttattatcttccctctctggactcctttccccccaccttctccccttcccttcttttctcttctatcagtggctttggcaaactgtaaaaagacatgggaactatttagttgtgctgatgatatagacataaactataccgcatggccccaatacctaaactccagtcctttcaaacagaagcagtaggttattttttgaaacttcagaaaagcaactgaatagtgataaagaaactggtagtcagaggacactttatatacaatttatctcttcttctcctcctcctcctcctcctccttctccttcttcttttcaagtaggactttgttttcccaggtagatttaggagctttctgcatgagctgagccccttttattttcacataagtaaatacacattcaggcagtcatttagcagctttcatgtccccgtcttcatctccacacaggtgaatatagtctctattttggcccattaaatgcactgagatgcctggatgctttttggaagtaagggtgtgaggcacaatcttttatgagactattaaaaaatgatccaggaatcacaatcatcactcatccacatttcttgctttggagaagcctcttgttatagattaaaatctgccttgggtgacactgtagtaacctctggtttgccttcaattggtgatatagtaagtgtcccagcttggcctccaggttcctgctatctggtgttatactttgtgggaagcccatccactgagggcttggcctcccactgtatgctgccatgtgctctcacctctatgctaatcaattgaaattttgtcacttagtgtcattccatgcctttcaattacatctgggagtttatctctccagctatcttgagactcagtggattgctgaagttgacttgttctttttccagctctgtccagtgacatcatattggtagcttgaaatctaccatggtggtgagtggggatcaggatctataccacagaattcagaaaacaaggaaacctgtaaatgctatagatcagggctctcctgcctcctgcttgaagagccagttttaaatatttactagcatgccacaagattatttattttgtaactttggcagcttaacagtgtgccatggacatagtaggtgcttaataaatacttcttgaatgaatgaatgaatgaaaagaaaacaccctattctaactggtaatctgagttttccctcccaggatatcctcataatttgggtctagacaaatctccttcatcccctataccccacaatttagctgtgtctcatggtactcaagtactttgacagtagacagtatctactaaatgttaaatacaggtctatctcattctctagtgtggccccagcttaggtggtgcctttgcaactgtcctcaacctatgccttgagtccgtgtggcatgtttctattcaaagcctctttgcttgctcctcatagcagcactgaggcaggcatagggcaggaatagagagattgagtctcaaacttgttgactgctttgatgacactcagcttccaaggcacagagttggagcacaaactcaaggcatcagaatcataggctaggctggagtccagttccagcctgcaatttgacagtttccgagacttcagttgctccttacttggcctttgtgagtgtctggctgagggggatgggcttctccccaagcctgtcctctttctcaggtctgaaggtcatcgtgggggccttgctacgctctgtgaagaagctggtcaacgtgattatcctcaccttcttttgcctcagcatctttgccctggtaggtcagcagctcttcatgggaagtctgaacctgaaatgcatctcgagggactgtaaaaatatcagtaacccggaagcttatggtaaatacccaacctttctttcactccttggtttttgcatggttaacttttccttatcctcacttgtcctgccttcacacttcccttacagagtctcttagcagcaagggaggacttcatccatccagggtgctcctgtgggcagatgcatttcctagagaattgcctcattctttggcttcctatggagaaggaaagtcttgaaaccacatccacaagagcaattctatgctgtcccatccctttgccatttagatctctgcccacttctttgtaatgatttgcagaagtttttagaatgcttggatttggctaacaataatcagcagcttcccagccccactcctcaagtatttctccaatgacacgtcttttttttttttttttttttgagatggagtctagctctgtcaccaggccggagtgcagtgacatcaccccactgcaacctctgcctcccaggttcaagtgattctcctgcctcagcctctcaagtagctgggattacaggcatgtgccgccacacccagctaatttttgtatttttagtagagacgaggtttcaccatgttggccaggatgatctccatctcctgacctcgtgatctgcccacctcagcctcccaaagtgctgggattacaggcgtgagccaccatgcccggccaacaacacttctttcagtgcccaccctctccatgctgaggttgaccctacacctactccatgtgtcatgaatctcatgtgactacactctcttgatgtctctcatgggatgggtctgtgtccagcttcccccagggaggatcttcggttcagtattatttaagagaggcaaagtggtggtggtgatgtcactgcttcctcctccaacttctccttccttcttcttttccctccttccttcttactccttccagaggtcttgggctccagtttctctctggacacacctcctttaatcattttagaagatgtagaaacatccattttcaagcataatctgcatacttactattctctttcctttcaatgttttttttaaaatctgaatttatgactttttcctctctcagaccattgctttgaaaagaaagaaaattcacctgaattcaaaatgtgtggcatctggatgggtaacaggtaagaggtttataatcattttcctcccaagaagagtacctctagaccttttagaatggtgtggcaaacagtctttaatgactggtggacacagtgatgatagttctcacataattatttcatgtgtctaaacatgtttagacttgtgttattaaattaaaaaatcatttcctggtgtttaaggcagctttcctccctagttatgttaaattggaagcttataagaaacctactgaaacagtgatatttcaactttatggagtaggtattcaagactttcaaaactgagaagggatgttatgactgagagccctgtgaggcccttgtttcctgttcagtggcattgccctgctgcaagagtatctgagcatgcttcttctctttgttgacctgttgacaactattgcctcaaattacaaacacagttgaacatacatccacttacacttgccccaacagctgctggccctctgctccaatggggaaactcttttttccttcaggttagcggtgctttctattgtgaaagattcaattcagtgaagatttattgagtgtatttcaaattaagataatatgcaaggtactctgatgaaatagatgacattcattcctaaattacaaatagataacaagaatctacagagtgccaagccctgagtttgcctcaaggaatgcaattgtgaacaaggcagctccacgtttttggatttgatgtcttctagggaagacagatgcacagaaaatgcagttatgtgttgcataatgatatttagattgataatggatgatatatatgatactggccccataaaattataatactatatttttacagtgccttttctgtgtatacacaaattattaccattgtgctacagttgcctacagtattcagtatagtaacatgctgtacaagtttgtagcctaggaacaataggctatgccacatagtctaggtgtgtagtaggctataccatctaggcttgtgtgtacactctatgatgtttatacaacaaaattgcctaactacacatttcttagaatgtattcctgctgttgagcaatgcatgattactagaaagtgtgatgagtgttataagggtgatgtgcaggtgctgagaggtatgatggggttgtgaccttgtctggagaattagggaaggcttctctcattccatttgcaagacacgataggctttaatctaatatgaagcttactgagctttctagaatgattcccaacagcacacactgcattgatattgttgaggatcattctagaaagaaaaactgtcttccatgaaaccggtccctgttgccagaaagctccccaacattttggcaccagggactgatttcatggaagataattttttcgtgggcaggaagtgggggtggttttagaatgaaactgttctacctcagatcatcaggcattagttagattctcataaggagcgtgcaacctagatcccttgcatgcgcagttcacaatagggttcacactcttatgaaaatctaatgcttaccactgatgtgacaggaggtggagatcaggtgtaatgctcactcgcctgctgctcacttgctgtacagcctagttcctagcaggccatgaaccagtactgctctggggcccgggtttggggatccctgtcttaaagggagcccgacagctgctgcatatagcacttcttttacccctcacacaggcagacaggtgtggttaccataggcagaatccaacgtggggtgtataacctagacaggcagaagcagcagccttgtttccaactagtcctttttttttttcccaagtcttttgcctccaaaatctcttattacaatactatactgctataaaaagtccaaaaaactattttagctgttgaaaactcaaataacatcagacacaaaatgaatcaagtgtgatgtgtatatgacaatagagagtggtggggaaagtagagaggcagaggacacataccatgcttaacagcagtcaaacttgggtattttttttatttcagtaggttttgggggaacaggtggtacttggttacatgaataagttctttagtggtaatttctgagattttggtgcacaaactggtcttctttttagcttttattttaagttcaggggtacatatgcaggtttgttatataggtaaatttgtgtacagattatttcatcacccaggtattaaatctagtacccattagttatttttcctgattctcttccttctctcaacctccaccatccaataggtcccagtatctattgttctccactgtgtgtccatgtgttctcatcatttatctctcatttacaactaagaacatgtaggatttggtttttctgttcttgcattagtttgttaaggttaatagcctccagctccatccatgttcttgcaaagtaatagaactcattctttttatggctgcatagtattccatggcacatatgcaccacattagctttatccagtctgtcattgttgggcattcaggttgcctccatgtctttgctcttgtgaatagtgtgacaatgaactttcacttgcatgtgtctttatgatacaatgatttatattcctttgggtatatacccagtaatgggcttgccaggtcaaatggtagttctgtttttaggtctttgaggaattgccacagttttccacaatggttgaactaatttacactcccaccaacggtggataaatgttcctttttctccgcatccatgccagcatctgttattttttgactttttagtaatagccattctgactggtgtgagatggtatctcattgtggttttgatttgtatttctctaatgatcaatgatgtacaactggtctttatagggctcttgtctctaagtttatgtgccagcacatctctctcagtctaggtacaatatgaatgctccagagttttgtggtaaaccaactcctagtacacagcattccacagtgatcacaacatgcttgcttctgaggagatggcactctgagaaggcaggtctgtgatcatctttccaggcaggctttggtcttttcagggcccaggctagtcttcaccctccagtcactgcttcctcccctgctgactaattcaccgtgactacaactcagatctgaagtctaagtaggaggttccagtagataaagagtgaacaattccagacagtaggcacagcaagggtgagcataaggccttggagcacaagagcatatagggattgacaagaagcccagcaactttttgggcagacaggcaagagagcaggaaggaacagagacaagagccaaccatgaaggacgtgatagctcatcagtgccaacgattttggtcttgatcacaaaggaagcaggagacatggaaaggttttagggcaggcagatgactgggcagattagacatattttaaaagccactatggtttctgtatagagaatggatgcatagagtagatgaggaagccaattacaagactgtggtagaaagaataaggatcatgaagatgtacagtggtgatgaagaaagctggatggatgcattccagagacgtttaggagacagaaagactaggacatatcaatattagccttgaatgtcaatgggctaaatgccccacttaaaaggcacacaatggcaagctggataaaaaagcaagacccaatggtatgctgtcttcaaaagactcatcttacatgtaatgacacacataggctcaaaataaaagaaatggaggaaaatataccaagcaaatggaaatcagaaaaaaagcagaagttgcaatcttaatttcagacaaaacagactttaaaccaacaaagataaaaaatagataaagaagggcattacataatggtaaaatgttcaattcaacaagaagacctaactaatctaaaggtatatgcgcccaagacaggagcacccagattcaaaaggcaagttcttagagacctacaaagagacttagactcccacacaataatagtgggagacttcaacacagcactgacagtattagacagatcactggggcagaaaattaaccaagatattcaggacctgaagtcaacattggaccaaatggacctgttagacctctacagaactctccaccccaaaacaacagaatatacattcttctcatcaccacatggcccatactctaaaactgaccacataatggaacataaaacaagcttcagcaaatgcaaaagaaccaaaattttaccaaacacactctcggaccacagcacaataaaaatagaagaaaagactaaaaaaatcacttaaaaccatgcaattacatggaaattaaacaacatgcctctgaatgacttttgggtaaataatgaaattaaagcagaaatcaagaagttttttggaactaatgagaacaaagatacaacataccagaatctctgggacacagctaaggcagtgttaagagaaaattcatagcactaaacgcccacatcaaaaacttagaaataacttaaacaatgtcacatcacaatggaaagagttagagaagcaagagcaaagctagcagaagacaaaaaataaggaaatccaaataaacacaattagaaataacaaaggggatgttaccactgaccccacagaaataaaaataaccattaaaaactgctaaaaacacctctaagcacacaaactaaaaatacctggacacaaacaccctgccaagactgaactgggaagaaactgattccctgaatagaccaataacaagctccaaaattgaatctataataaatagcctaccaaccaaaaaaatcctgagaccagatggatccatagctgaattctactagatgtacaaagagcaggtaccattcctacagaaactattccaaaaaattgaggagcagagactcctccccaaatcattcaatgagaccaccatcgtcctgataccaaaacctggcagaggcacaaaaaaagaaaactttaggtcaatatccttgatgaacattgatgcaaaaatcctcaacaaaatacttgcaaacctaatccagcagcacattaaaaagctaatccaccacaatcaagtaggcttcatccttgggatgcatggttggttcaacatatgcaaatcaataaatgtgattcatcagaactaaagtaaaaaaacacatgaatatttcaatagttgcagaaaaggcttttgataaactcaacatccattcatgttcaaaactctcaatacactagatattgaaggaacatacctcaaaataataagagccatctatgacaaacctacagccaacatcatactgaatggggaaaagctggaagcattctccttgaaaagtagcacaagacaggataccctctctcaccactcctattcaacatagtattgggagtcctggacagagcaatcaggaagaaaaagaaataaagggcatccaaataggaagagaagaagtcaaactattcctgtttgcagataacatgaatctatatctagaaaaccccataatctcagctcaaaagctccttcagctgataaacaacttcagcaaagtttcaagacacaaaatcaatgtacgaaaaccactagcattcctgtataccaacagccaagccgagagccaaatcaggaatgcaatcctatttactattgtgacaaaataataaaatacataggaatacagccaacagggaggtgaaagatctctacaatgagaattgcaaaatgctgctcaaagaaattaaaaatgacacaaacaaatggaagaacatctcatgctcatggataggaagaatcaatatcattaaaatggatatactgcctagagcaatttacagattcagtgctattcctatgaaattaccaatgacattcttgacagaatttaaaaaatgctgttttaaaatttatatggaatcaagaaagagcccaaatacccaaggcaatcctaagtaaaaagtataaagctggaggcatcacgtttcccaacttcaaaatatacaacagggctacagtaaccaaaacagcatggtactgatacaaaaacagtcatatagatcaatgtacagaatagagagcccagaaataaggctgcacacctacaaccatctgatcttgaacaaagctgacaaaacaagcaatgaggaaaacaccctattcaataaatggtgctggaataactggctagctatatgcagaagattgaaactggactcctttcttacaccatatacaaaaatcaactcaagatggattaaagacttaaatgtaaatccccaaactataaaaactctggaagacaacctatgcaataccattctggacatagaaatgggcaaatatttcatgatgaagatgccaaaagcaatcagaatgaaaccaaaatttgacaaatgggatctaactaaacttaagagcttctgcacagaaaacaaaaacaaacaaaaaccaaaaaactattaacagagtaaacagacaacctacagaatgggagaaaatatttgcaaactatgcatctgttaaaggtctgatattcagcatctataaggaaattaaatttacaataagaaaacaactccactgaaaagtgggcaaaggacatgaatagactttttttttaaagaagacttacatgcagccaacgagcatatgataaaaagctcaacatcactgaccattagacaaatgcaaatcagaaccacaataaggtactatttcacaccagtcagaatggctatcattagagtcaaaaaataacagacgctggcaatgttgtggagaaaagggaacacatacactgttagtagaagtgtaaattagttcaaccattatggaaagcagtgtggcaattcctcaaagacctaaaacagaactactgttgctggattcatcccagcaatcgcattactgggtaggtacccagaggaatataaatcattctactgtaaagatacacacacatgcatgttcattgcagcactgttcactatagcaaagacatggaagcaacctgaatgcctatcagtgacaaactggataaagaaaatgtggtacacatacatgatggaatactatgcagccataaaaaagcaagagattatgtcttttgcgggagcatggatggagttagaggccattagccttagcaaactaaagcaggaaacagaaaaccaaatactgcatgttctcacttgtaagtgggagttaaatgatgagaactcacggacatagaaaagaacaacagctactgggacctacttgaggatgaagggtaggagcagcaagaggagcagaaaaaataactgttgggtactaggcttagtacctaggtgatgaaataatctgtacaacaagcccctgtgacatgagtttacctatataacaaacctgcacatgtacgccagaacctaaaataataggtaaaaataaataaatagaaagaaaaaaatttggagattgaagaggggatgttggtgtgtatttgtgcatacaaagccatgtgtaagagagtggcgggaagtgcaaaggagagaaaactgttacagatgcttctcatatcagtgtgagtgagtgataatgtcattagctgagatggggatgctggcggagaggcttaatcacctgtataagttgatgagagggtgcacccagagaggaggagattgaacaaaacaggcttatattttgaatggtgaccaagaaatgagggagattaaatatggtaggtccatcctcagcagactcctggaagttagagggcactgggacttcacagaatttcctccaggtctggtgagaaagagggcacaatggatgccctcctcctcagtcaacctaaagcaaaacctaccactcacaaattcccactctgcccaccaggcaaatcccaatcagcttgtcaggtcctctgattaaaacacatgaacagctcaggctcaccaggcatctgaagaaaatctttggtaaaaaggaggccaagataaagccacagaaaatgtggccatgaacaaaacaagagaaccagaaagggctctgaaaactttgaatagtgtccttggtgaaattaaaagagatattatatacataaaacaaaaagcagcttgttgtgaaaaaagaacagcaaaaaaagaaacttattagaaattaaacattattacacaaaaatcaacattagaactaaaagataaagttgacgaaatagccccgaaagtaggaaaaagagaacagaaaatttgagagtaaatgtcaattcaaaagtcccaacttttgactaagtaggaattctacaactagagcactgattaaacaaaagggaggaaattagtgaagaaatgatgcagagaatttacctgggactaaagatgcaagtccctcagtgctccagaaagtacccaacacagtgaatgagaaaggaccatgccaaggacattatcatggcatttcagaactttttggaaaaagattttaaaactaatgggcaaaagaaggtcacccaaaaaggaacaaaaatcaaactggcataagaattcttaatagcaacacaggataataactgagcagtgctttcatattgctaaggaaaaacttccaactcagaattctatttctggccaaactaccaattgattgtgaaaatggaataaatatatattcatatatgcaaagattacacaatcttcttaagaagctaattgacaagtgctccagaagaatgagggagtaaaacataaaaaagcaacatgaaaaagccaagaaaaaatgtctaccatagcaagaagttaatcaacacgaactacaattgataaatcaaatatcagtgtaagcactatttagatatacggaggtagaagagttaacagttgttgaatttggggtgtataaatgacagttaaagaattatacaattgatttcattataagctttttggtgcatgtaatttttaagccatgtgcatgtattactttgattaaaatactatttattaaaaaactaagaaatacatacccttagtacatcttatagatacactcaataatttgtgttttggtaatatgtgaaaagacctatgttcaaagatattcattgcccaaatgtttgtaagagtgaaggactgtcaattactgaaacctaaatattcatcattagcagagcagttaaataaatcatagaactatagacatgaaaagaaataagatatctccctgtatggtgatatgaaaagagctctgaactatattgttccattaaaaaaagcaaggtgcaggagagtgcaaagcatgttcccatttttgtgtattataaaagttgtgtgtagatatagatgtgctgtatagtcatagcaaacttctggaaatttacaaaagtaactgttaactattgcctctaagaagtgggatcaggaaactgggaagagaggaagacttaatattcattgtatgtgcttttatactattcattgttcacgtgtcactgtactcaatttttcaatgaaaaactatcttatatgaatttattaatcagttcattagcaaaagagtcttgtcagacagtgcagtgggccactttacaaatactcccttcctctagggctcctggtgtgatcccacagcccttggaaaaaccagagtcgttggaaggaaaaagaagcttggctgtggcgtacataattatttctctgtttgtttccaatatctagtgcctgttccatacaatatgaatgtaagcacaccaaaattaatcctgactataattatacgaattttgacaactttggctggtcttttcttgccatgttccggctgatgacccaagattcctgggagaagctttatcaacaggttatctatttatagtctctctttttcctctctccctccctccatccttttccttccccctctatcacttacctatttatttaccatttatttataactaccattcatcccccacttttatcatctgtctcatctttaacagttgtactgttaaattctgccttactaattctgttagaaacttcaagaaaattggccaggcacgctgactcccgcctgtaatcctagcactttggaaggctgaggcttgaggtcaggagtttgagaccagcctggccaacatggtgaaaccccaactctactaaaaatacaaaaattagcagggcatggtgacaggtgcctgtaatccccactacttggaaagatgaggcaggagaatcacttgaacctaggaggcggaggttgcaatgagccgagatcacaccactgcactccagcctgggtgatagagtgaaactccgtctcaaaaaaaaaaaaaaaaagaaacttcaagaaaattttaaatgcaatatttggaagaagactccaaagaacccctcctcttcctagaaatgttagccccctccagattccctactgccctatctctcttgccacttttattttaaaaatgcagatactcttgagagagttatagatagtaaagtcactgaaacttccatgtgaaggtgtggatagtatctccccactgagagatagggcatcaggaatccctggagtattagggaagctatatggtctgtggtcaactgagcccaccagtgctgggggaagaccagttgtctgctactgtgtggtttttgcttgaggtgatggtcactttcctgtggaagaaggtttgatattcaagaacatgctctgtcctttgcagaccctgcgtactactgggctctactcagtcttcttcttcattgtggtcattttcctgggctccttctacctgattaacttaaccctggctgttgttaccatggcatatgaggagcagaacaagaatgtagctgcagagatagaggccaaggaaaagatgtttcaggaagcccagcagctgttaaaggaggaaaaggaggtagggacatggggtcagacagtgggatctgctctggggaggggaaggggtccccagaggcaatgtgacctgagactcaaggctgccacccttggcctggtctcagtgctttctctactggtgcttttctgagaatataagtccctcgaagaatggctgtgctgctatctttcacaaaattgtccaggcaccaggcccttcaaaacggggaacgcttggtcttgatgctttttgaccttctgaagtctaagccttctaagacatgccctaaattactgactagacgatacaacataagtatatgtaaatccaggctgtgctccaggctttcttttggaaatctggagatgtttgtgttcggcgcctttgcttgaggtggactctagaataatgttcacctctccctgtctgcaatccttgtcttatttataggccattctaatagtttccttggaatctttacattcttccagctcaagtctcagattttcaggacagggaccatgttttatactcgcactgatcctctataagatttgtcagaaggatgcccatcgtaagtgcttaacatctgcactatcaggcataagtatttattgagtgcctagcgcatactggacactgtgctaaggggcagtgacacagagatatgaaagagtcaatgctgcttttggtggctgcaatttctgtgcaaaaacaggacatgtttccccagataaataacagagctagcgtagtccaggtagatgatgagcaatttaaatgatacagagctaccagaagagagattttcaccactctcaggtcggggtcatttgcaatgtttcatgaggaggtgtaatctgttctttaattgcttttgttcaatttgaaggctctggttgccatgggaattgacagaagttcacttacttcccttgaaacatcatattttaccccaaaaaagagaaagctctttggtaataagaaaaggaagtccttctttttgagagagtctgggaaagaccagcctcctgggtcagattctgatgaagattgccaaaaaaaggtaagtcttttccagggaattaatgataccatattgctgtccagggggacaggtccaattgccaatcaaattgaaataattcatttattcagttactcatttattcattcatccatttgcacatactttcatgcatccatgtgtcttttcaattatccatttatttgtaaacatcaatttagagtgtttacagtgtttactatcttcttggcactgggataggtgctagggatacatgttttatactccacagagtgtacggctaatgatgaagatatactgataagaaggcagttatgagtcagtgtgatgactgatgtgctgattgctgtgggagaacagaggaggaactatgtgtcagtgtgggctccctctgaagcaaacccaaagacattacaatgcaagtagattatttgggaagtgatcccaggaagcactgggaaaggagggaagaagtgctatatggaatggaaggtaaccaatgaagatgcattatcaagccagttaccactgaagccaggtagttggagtttaatccttccaaagtaagggcatcaaagtgtgtgtgtgtgtgtgtgtgtgtgtgtgtgtatatatagatatatacacacacacacacacacacacacacacacacatatatgttggtatatatataccaactttggaccatcatagattaaagattgctgaagacagaagacaataatttccctctaatttcctacttgctgtgcactaaggaagacaggatttgaatcattagagaaagtcctcaagtaaggacatatgggtgggaaaaccaacagcatccagaattcatggggcctgggggaaaagcaatggaaaagggtccccagaagatgcagtgtgtcagctgaaaggatgaattcaccagtaaaaggaaaaagagagcattacctgcagagagaatagaatgtgcaaaagcctagaagcgaaggcaagcaggagaacatgacccattagaaaacttgccagtgtgtgtgtatgcgcgtgcacgcacgctcatgcatgcacatgtgtgatgaggctgggggagggtgggtggcacaaggctatagtgatcagttgggggatcacaaaagacctcgaaaacaaagctagagagtttacccttttcaatgagggctaagggtaaagagcattgaaaggtttatataagagagggatatgactggatttatgaaattctggatgcattgaagacaggggattggaggagggcaaaactggaggcgaccagttaagaggctgttgcagtaaccaagtaagaggtgcctgtggcttaaaccagggttagggaagtgaggatgaagagcaattaacagacgaccgtgatctggagaagataaaatttagcagttgacttgatggacagtgtggggataagacctggtttccgacatgattagctaacttgatggagggtaatttatggagacaggaaaggtacacattttgggagtggaaagatggctcattcagttttgaatgtgccaatttccagatgcttatgggacctccaagcagggatgttgattaggcagcgtgatgtgcagaaatgaagctggtggtgggggagggatgggcagcagaaaaagttattcttatcattaaggagggggatgttcagacatattttaattgtccagagaaaagtcagaagagaggaagatgctaaagatacaggtaaagatggcaagagccactttcctgagatagagggagatgtagtaggtagaaggtggatatgtatgcctgataatgtggtggggaaagggaattgagaggcctttgcagaagtaggtagaaggatcccatccactgctatgatcagttctctgctgtagtaatagggagagatctcatagaaagactatctagattggcttatcacaaaaaagatagttccctctggggctctggtgagtcggaacccttggaaaataagccactaggaaaacccaaattttctggatagctggaggtttgcactgtttaattccagtaactttagaattgtaggtagatgtgagagagtgagctagcccttgggcccagcttgagagtgtgtttgaggtttaggatctagattttgtgatatttagtgggactgttctttttagttaccaaccgttttaaaaaccgtataggcggttgttcacttcacaactgcagctagcacttcacaatctggctccagtccacctttctaaatttatactccacttcttacctttaaacattgtttacaaattggattttgtattgctttcatacccggaaccattgcttactagtttttgtaaaattttgtttgctctttgttggcagtgaatgaaacacagagaaagtaaaatgtctgtaggtaggactctagaaatgtgcatgcataggaaatatgaatgatcaaaccagatttctcttatttgttaaacatgaaataagaaaactgaatatttggcatgctgtaaagacgaggtgagtagacctatagaaaatgttgagcactttcattacatgtagcattggaacaaagtagtttgttaagttttgaggagaggcagcccctgtctttagaaggtgccctatgccttctcttacagccacagctcctagagcaaaccaaacgactgtcccagaatctatcactggaccactttgatgagcatggagatcctctccaaaggcagagagcactgagtgctgtcagcatcctcaccatcaccatgaagggtaagttccacatcccaatccaagggaaagtctacttcagtgatgtccttccattcttcttcttcccaatcccctagaagccctctgcaaaggaggctgttttggaaccaacccactgtaccatcctgcaaagagtgacttcctttgcctctttggagcatgtaaacaaagtggctcacaagaagcagaccttccctgtgggcccactctaaactggcacctgggtagaggtggaagctggctagacttgggatgggacttcagacaaaatgcataaacagggcctcaaaccaggcctgggagtcacaagagatccaagtgacaacaatagtcagtcaaagaacagaagactttgaagtctccaggaggtggcagttgttattgaagttagagtcagaaaccccacatgggcaatagaagacctatgtagaaaggctggagccatctgatggaccagattaatagcaggtaacaggaccccaccccaggggttggtgttcaggagcaggatttactccctgcaaggggggtcaaataggtcctctagcacttttaagcctactgcatcatctcgtttgccctgcatgtgtccctgcagcggtgccagggaaatcagggatggtctgaactcaactagaggatagagtcccttttactgtttcagtgcttatagatgccccttcccttgagccctggttgccccttttgcctctgttacagctgaccttatggtctgtcttgagtggacataacttgtgcctgtatctatctctctcttggattcacagccagccaatgttgatttccacatctatatatctaacatcaaagctcagctcctggatgctcagtaagagtgtaaatatttgatggacttgactgtaccgcatgctagttgtatgtggaacattgtctcttctgcactaagattggtggaaaaacctttctgactacacaaatcaaaacatttcacaactgatcatgtatcaggaggccctggggaagagggaggaaggaatgcactcaggcaaagggcatctggattgcttcagagctaactcctcaacctctcgctcattctcctccagaacaagaaaaatcacaagagccttgtctcccttgtggagaaaacctggcatccaagtacctcgtgtggaactgttgcccccagtggctgtgcgttaagaaggtcctgagaactgtgatgactgacccgtttactgagctggccatcaccatctgcatcatcatcaacactgtcttcttggccatggagcatcacaagatggaggccagttttgagaagatgttgaatatagggaatttggtaacattacactttttaaaaataaaaaacatatttcatactttaaagtataactttttcaaagtctaaacattttgtgaatgagctaacctaacctaggtttttggtccccttcagtggagtgagggaaaagatggctgttacggttttacttttacccggttcatttcagaaactgtccatgtgtcctgagttggccctctggtatgttcaggtatctctttagccattcagtggtaagccagatacaagcagacatcctaaaagttcagctctctgagataatcaagaaaatgttaaccatatccagagaaccgtggtaatggctgttgtggtcccagtgatattcatgacatcatttgtcacaaaataatgtgactactattactaggtgttattctccctggaaagatgaatcagggcctgtcagctgtggaagtttcacttttttggaaggggttgtttgggggttggtcaggctggggtggggtgaatttccagacttgagcctgcttcaatatgtttctcattggatagatctagtctcagttaaattgggaaaactaaggggagcagacttttcaaggactgttcacttcagtttatggttcttgtggaaggcatttttctcaaggaaaaattagtccctcgaatatcagaaacaacaaataattgcccacgggatgatctaccctaattagctgatggattaatgagctaaaaaccttaccagaatgtctagccttttcttcttaaacttttgttttatctttctaatttaaaaaataataaatgctgttttattttttaaaaataaggaaaaatataaataagggaaatagaagaaattcatgtcccatgtacctgctgacaaagatgatcatttttagcattgcagaatatttgcaagctttatgtaagcatgtatgtatgtgtgtatgtatttttatttagtgttattttttctccttttttggcatttttttttttgtgatgtctttttacatgtctttaaaaaatttgttttacattgttaagaacccactgcagccgagcacagtggctcacgcctgtaatcccaacactttgggaggccgaggcaggcagatcatgaggtcaggagatcaagaccatcctggctaacacggtgaaaccccatctctactaaaaatacaaaaatttagccgggcatggtggcaggcgcctgtagtcccaactactcaggaggctgaggctggagaatggtgtgaaccagggaggcggatcttgcagtgagccgagatcgtgccactgcactccagcctgggtgacaaagtgagactccatctcaaaaaaaaaaaaagaacccactgcactagagtcaggtacctgtcatccttagttccacatccctccacaaggagcagtgatacagtggaactgtagtataaaaccagggtggttctcctcacaggcagtctgcacatagcacataaattcctttctccatgctgcctttgggaataaatgctttgtgggtgtgaatgggttagactagattccatgctgcttgacaaacctaacacatagttgcttgtaacagatcagggtctcctggccatgtattcagctatcctctgctgaggcatctcagaaatgagctgaaattgtttcagttgaaggcagcaagctgtgtctataggggcatggtcagcagactccaccttttagcacctcctggtggaatggagttactgaataagttgtagagaatactcaaaaacccagagtcatctctgtggacagggcttcccaattgcagtggtgatctgttttcatctgctggtccaaatttagaaaatgagaaaaacccccatctcagatttaccactgactagacatcctgagtgtggaggtgaagctacattttgcagttggaaactgagtgattgacattcttcttcacttcctccagagcaggaggagccacagggccacagggacattgttgttttccaagtacacaggcagcagctgcaccctagctcctaaaaattggcaggaaatatgtagaaccatacacatagcttgtgtttccattccatgggcctactccctggacatacaataccaaaatggcagccacactatttactgctcccatggtagtagtggtggagagaagccttggagtcttaagttccaaggagcacatcaaaacttccctcctctgatgcatgggccaggattaagccactctgtagagttctgcaggactggactagaaaattaactctctagggtagagattgctctaatcagagggatacactgaatgccaagaagccataaagaaaagttggattgaattgacaaaacaatggtcccaaggtatctggtgatgctgtagagcttgatgcctaaagcctaaaggagatacaagaaggaggagtgagtcaaaagaggtggggatgactacacaattatctaggacaggcatcactgtatgcttttagatactggtggtgacactgagcaggagtagatggcagtatttaaagggggaatatgaaaataaacttgaattttctttgtaactcttgatttatttttatttttctaccctggatttatctttgctatccttttgtctttaacttttgccattttatttcaggcatttttaaaaataaatagtaaatcattgaatcatttataaaaatagataatccattatttttaataatcgaatttagtcgtttataggttccccccagaattgtagtagacagttttataacaatccttgtaaagactttaatccttttaatattaccttattatttttgtattcttgcttttttcatttctatttatttgtgtttgtatgtgataagactgtgctgtttgccgtgaagaaattatttgctttattttttgcaaagatatggaagacagatttattttttaattggctactacattcaacatttttacatatttcttaagcttgtatttatctgattattgaagacaaagacaaaactattttgcccatggaaaatacaaaattcagtactttttgtaattcctgcctctcctttttattctttgatattttgttctggaaatgtgagccctgcattctgaatgagttttaggattatattctgattcactaattctcctttcaaccataacaaatttaaggcttatcccatatattgagttgctcaaagactttttttttttttttttgcccctggaagtgttttctaattctatgatctgtgccccttttttgtttttatttttaatttttctgatcaaggtgttgaaattaggtggtcaggtgaactcctcctggattctagtttatgggggataattatccttagttttcagggctattgtttacattccttctctccctattttaattgttttaattggtattctaaagagaattcagaggagaaattgcctgacactctgtcaccctgccatctaccagtaataccattttgctttatcttcaacagaatgagaaataatattcattttccattctggtgtctgtgagcttggttacattgctctgggcaccatggagagggatggagagaggagcaaagtcatagtgaggttcatgctacaatagtaaatatttctattgcatggactttagggtatagtgtgtcaatcatgagaatacttttcatttcattgtaacctctgtacttcccttgggccattcttaaaagtgttatctccgcagcttccttctctcattcttctttgtcccactctaggttttcactagcatttttatagcagaaatgtgcctaaaaatcattgcgctcgatccctaccactactttcgccgaggctggaacatttttgacagcattgttgctcttctgagttttgcagatgtaatgaactgtgtacttcaaaagagaagctggccattcttgcgttccttcagagtggtaaggcactttcttattttactgcataaacgtagctgcctaagtggaaaaaacgttttgagtgagttcagtggttatcttgtactaaactttaatttatcttaccttaaccccagaaccaaaactgcactcctcttcctgcacaggtctttaatagtcttgcaagtccctggggggacttcgcttaactgaacccttatacccttagcccattcctgccagagatgaccctttaggcaactgggtacaaaattgtgtctcccagtgtgaggactctgttccttgctctgtgcacaacccttccgacactctttttttcccatggagctgtgaggcaataaataaataagggaaaatattcctatctttcaggtcatattgggctcgccaaggggggcaaagactatagaatgccggggaggaatgcaggggagctgatggcaggtgctatctatctcacaagtttccttctcactgctgccagtgctacatttctgttctgtagtctttgcctgctatccagtttggaagcattctggaaacctttacaaagtacctaatataaactgacatgagggaaggcacaaaggatgaggaaatcattgtctttgagaaggttgcagcacaggagtgatacaagactgggctacatgcacagtacagtgtgacagagcccaggaaaggtatagacagaggactacagagaaatccaatctgagaaggggaactagaaaacctccaaggtgggattttgtcccctttcaaagatatttacctttttttttcagataggatttttaagcctatagagtaagacacctcattcagttacctaaatgtacattttatattttttatacttgggatatagtaagaggttacactgctcaaagtcaggtgttattaagctttcctactaatgttttattagcactcaggtaagcaaaattgcatttgctttatcattgtttaggcttattacagccaggctctaatgcacggaaatctgtggcattgtctctgtatgagaatggaaccacaggtttttcctgggatgctcctagctcccctttgagtagacaatgacagtcctcttcaagcagaagccttactgacctgcaacatttccatccccaaataggggatgtgcttaacaaaattgtactttggagtaaaaccgtcagtttatatcaaaagttaatataagaaacaacctataaaacaagttgctatgttttctctaaggttgtttcctataaagtccgtgaagatctaggataaaatttctctgtggaaaaagtatacaagtcttgaatagctggttgccttttctctcctgactacaaatgccatattactctaatcattcttatgaggcttagattcagactcgtggcctgaattatataatgcagaagttagcaaactttttctgtaaagggccacatggtaaatgttttcagccttacaggctgtgtggtctgtgtggcaaccgttaaactttgccattgtagcacaaaagaagccatagactttcaaaaaccagtgagcatggctatgttccaataaactttatttatggatgctgaaacttgaacttcatatgattttaatgcatcatgaaatatccttttgattattgttattttcttttttgagacagagtttggctctgttgcccaggctggagtacagtggcgtgatctcagctcactgcaacctctgcctcccaggctcaagccatcctccctcgtcagcctcccgagtagctgggactacagacgcacaccaccacgcctggctaatttttgtattttttgtagagatgggggtttcaccatgttgcccaggctggtcttgaactctcctgtgctcaagcgatcacccacctcagtctcccaaagtgctgggattacagatgagagccactgtgcctggcctgattatttttcaatcatttaaatgtggaaaagtattcttgtctctgaggtcatacaaaaataggcaatggactgtatttggctctcaggccagagttcgctgacgcttggtatattacatataattccaaaatattcattttatataataattatgtagctcagtcaccatgctgatcccaaagtccttaatgattaaaaaactaaaacaaaatatttccttttttttttttttttatgagatggagtcttgctctgtctccaggctggagtgcaatggcgcaatctcagctcactgcaacctctgactcacaggttcaagcgattcccctgcctcagcctcccgagtagctgggactacaggcatgcgccaccatgcccagctaatttttttgtattttagtagagacggggtttcaccatgttggccaggatggtctcaatctcctgaccttgtgatccacccgccttggcctcccaaagtgctgggattacaggcgtgagccactgtgcccggccaatgtttccattttcaaataagaaagtagatacaggtgagcattagattatgacagcgatctgatggctatgttcaggatagatttaactttgaagagagttttggatgtcataagtttgggtatatgtcatttgctttatagatgagcagatggagtttgtccttaactggcttttcttccatttttgtttgttgtctttttctacagctcagggtcttcaagttagccaaatcctggccaactttgaacacactaattaagataatcggcaactctgtcggagcccttggaagcctgactgtggtcctggtcattgtgatctttattttctcagtagttggcatgcagctttttggccgtagcttcaattcccaaaagagtccaaaactctgtaacccgacaggcccgacagtctcatgtttacggcactggcacatgggggatttctggcactccttcctagtggtattccgcatcctctgcggggaatggatcgaaaatatgtgggaatgtatgcaagaagcgaatgcatcatcatcattgtgtgttattgtcttcatattgatcacggtgataggaaaacttgtggtatgtgtcttagatttttttcaaaaaaaaaaaaaagatcctacatgcctctcaaatgcattacttcatttgcaaaactttactagtaaaaattattattctaaatataatgccaaataaatatttgaaatattcattcaaattttgtttgagaaaagtatgataagcatgaaaaaacctctttgacacatattactcatttgactgatgcccccaaatttattttattccagatgattattctaagacaatagtattctcttccccagtgattggctgaaataggagttagtgagttaatttggtcaataggatgtaaagagatgtccactggagcaatttgggaacaatcttttgttcttaagaaatatgtgtttttaaaaaatgatcgttttacttcctctgggcttttttatgactgtgacccctggaaaagccagatcatgagcttagagctgtggtggaattgcccacaggaatatggatctgacatccaggactgctgtgcaatcctctcctgtttgcacgaattgagagatggtgtactttgtgcagtgtctttaggtccctgttcccctaacttcaatgaggtattggggcctagccagaggggtttggaccaaacctgcaaacattatgcaaccatgagaagagccagcctaaaacaaagccaacactgaggcaggtagagtgaaaagagagaacaaacctgtattcatgtcataattggcctgctgttctattttcgaacttcttgttatgctacagatttttgttgtataagctggcttgagtctgttacttgcagctggaagcatagatatttatgaggaggctaattaagtgcacttcattgccttactgcacaagatcttcaggatcaagttggggttatagtgcaatataattaactctctacacacgatagctttatcctaagtacctaataaatggtgtgcctagacactaagtgatacatacaaaagctcagaagaacagggcatcaccagtgggagtgggaggagagcaccgagaaaggattcgtggaagattacagaacttgagaagaccacttatatggtaaggaggacttagacagatagaggagagcttaagcaaagatccagaggtgggaattctcacagtgcagctgaggaactgtgactagacccatttacacccaccaggcacttctctccaaaggctgtctattgtcgagctgaagagagccacaaacaaaggaatttgaggaggtaaagatgatgaattagagagtgtgtaattatgagcaaagaacccaggtaggaagctattgggattatgtgaatttgaagtgatatgtggttcaacgaaagagttgcatatttggtccaactcgcttggcttggccccagtacgttactaaggttagggcaacaggacctaaagaaactgtaaagtacatcatctcacaaatattcaaataagaaaggactgtacattgggcttgaatatcagattcatatccttgtgggaaattccagcaaaaatcaaagctcactatccagctgttcctcaagaaatgtactctcaattttgccatatggttatcccattctgctttaccctggtaagggtctactcatccatattatttatatgtagggaaagtggacttggctatttgcaccctttaatttcaatttttattctgtcttactgtttctatttctttctcaatcttttatttattggatagatgagctttcttaggagacagtgggacataaaactctaatttgattctgtttttagtcttggggaaaagttgtcctggaaacccactatatcttttcctttgctaaactttcctttcttcttgctacccaccccattcccaggtgctcaacctcttcattgccttactgctcaattcctttagcaatgaggaaagaaatggaaacttagaaggagaggccaggaaaactaaagtccagttagcactggatcgattccgccgggctttttgttttgtgagacacactcttgagcatttctgtcacaagtggtgcaggaagcaaaacttaccacagcaaaaagaggtggcaggaggctgtgctgcacaaagcaaagacatcattcccctggtcatggagatgaaaaggggctcagagacccaggaggagcttggtatactaacctctgtaccaaagaccctgggcgtcaggcatgattggacttggttggcaccacttgcggaggaggaagatgacgttgaattttctggtgaagataatgcacagcgcatcacacaacctgagcctgaacaacaggtatgaaggttcacacatagacttaaaggtcatacaaagctggagttatcacagggcactggtagcctgcccttttctaggcactatgcaaggataataagggtacaaaacgtggctgccctttgatacccatgtgcacatctcaggacaggttctttattgtggtcctgcaggtgtggcacagataggaggtgtcagaagagttcagaggggagcaaaatcagagtgggctgggatgacagggggagttcctttggttgaactctacaagaaatgtagaatttggactggctgaaaagtgaggaaaaggggattgggaagtaaactgaatagcatgttttgtttgttggttggtttgtttgttttagaaaaaaaaggcagtgctgggaacaaactcagtttctgcagagaccaatcttgtgggtgaggagtggtgggagatgagggctgtcagggagtgtgagggtaatggatattgtattagtctattcaggctgctataacaaaatattatagactgggtaacttctaaacaagagaaatttatttctcgcagctctgaaggctgggaagtttcagatcaaggcagtgacagatttgatgtctgaggagggcctgtttactgactcatatttgatagctataaatttctctctaaccaatgtttagctatatcaaatacattttattttcatttttattttctatatatttaattatattttattttatcttattttctaattcttcttatgatttcttctttgacccactgcttatttaaaaatgtgttgtttaatatttataaatatctcaaatttctatttgttattaatttcgaatttcactccattgtgatcagagaacatactttgtacaatttcagcccttttaaatttttgaggcttgttttgtggcatagtgtattgtctatcctggaaatgttccatgtgtacctgacaagaatgtgtattctgccatttggaattaagtgttctatagatgtctgctaggtttaactggcttatagttttgttcaaatcttccatttccctgttgatcttctatctagttgttattcattcatttctgaaaataaggtattgagatctccaatgtttattgtgaattgtctgtttcttccaacagttatgtcaattttcatttcatatattttgggtctcttctgttaggtgtgtatatatgtttataaatgctatatcttcccaatattttggttcttttatcattataaaatgtccctctttatctctagtaagttttttgtttttaaatctattttgtctgatgttaatagagtcatcccagcttcttttatggttgctgtttgcataacatgtctttttccatccttttattttcaatctatttatatctttgaacccaaaatgtgtcctctgcagacagtgtataattggatcttgttttcttatctattctggcaatctctgccttctgattggattggttaaaccattcatatttaatgctgttgttaattcagtttatttacttctcatattttcctgtttgtcttctatatgtcttccatgttttttcctttattatttctctactgcttcacttgcattaagtaaatattttctagtataacattttaataactttagttttttcaaaatctttttgaattatttccttatttgggtactctaaaatttgacatatacatctaactcatcagagtctatctcagatttatattaattccagtgagctatagaaatattactcatatatagctctatttcctctctcctgtttttgtattgttttaaattctacatattatattcatatatgttaaaacccaaacaacttttttttattattgcttaatataactagatgtctactgaaggagctgagaaaataaaagaaaataagtgtatatttataagatttattttaataaacttcttagttactcttggctgtcttcatttgttcctgtgactgtgagttacctgcaggtgtgattttcttactccaatgcaactttgctcccacccatatcctttgtgctcttattagcaaatatattttatttctatatgttacatacccagcaacacaattttaaacatattgttttacacaattgcttttgaaatcagctaaaagaagaaaggaaaagaaatatatattttttatcatacttgtgtgttgtattaccatttagggtcacttgttttttgcctgtaggatgtcctttagtattctttataaggtaggcgaactaccaaagaattctctgtgtttttctgggaatgtgattatttcatcttcatttttgaaagatagcctcactagatataaaaatcttggttcactgttgttttttctttcagcactttgaatatatcatatcactgccttttggtctccattatttctaatgcaaggtcagtgttaattttatcaatgtcaccttgtacatgatgaaccacttttctcttgctactttcaagattttctcttttctttgtctttcagcacttttactatgatatgtctaggtgtggatctctttgtgttttttctacttggggtttcattgggcttcttagatgtggagtgctaggatttgaatgtgtcctctaaagtttatatgttggagaattaattcccaaagtaacaatgttgagaggtaagacctttaataggtgattagattatgaggactctggtctcatgaatggattaatgctgttattgtgggagtagtttagttactgtggaagtgggttcctaataaaagaatgagtttgctgccttccctcctttctctttcttgccatgtggtgatgccttctgccatgttatgatgcagcaggaagtccttcacaagatactggcctgttgatcttggtcttcccagcctccagaactgtaggaaatacatatctgttctttataaattactaatttcaggaattctattatagcagcataaattggactaagacgtgtagattaatgttttcgatcaattttgaggagtcttcagccattacttatttaagtattttttctgttcctttctctctttcctttctggttggtgtgcttaatggtgcaccacatttctctgaggctctttttatttttctttcttttgttttctctgtgctctttagattgcacagtctctgttgattcatctttaaattcactggttctttcttcaaatgtactgttggtctctctagtgactttttcatttcagttatgataattttcaactccaaagtttctatttggttcttttcaaaatataatttctattgatattttgtatttgattgtatatggtcatagtatcttttatttccttaagcattgtaccttttaattctttaaatatatttataatggcttctttgcattctttttctattagctctgacatcttgaccctttcatgtgcagtttctgttactgactgttttcccctgtgtgcgtcacactttcttgttttttgcacatttcatatttttgttttgttttgaattggacattttaagtaacatattgtggaaactctataactgattcacttttctcctctctgaagcttctttattaaatggtaatctggctagactattttagtggaatctgctccctctccaacctatccccctccattcacacacaatgtgaaagctttggtgtcactcctaggagagtacatccttggatgtgcacacggtcagtgtaggatgactgttgtttcagcaaggctatctttgtctccttttgtgatctctctgttaagctgtctgcctcttttggtattacacttcgattttaggctcaactaattgctggataattgctctattttccttgacaatgccatggggcataaattgctcaactgtctgattcaattaaattcaggaagtgatagcttttaagcgcagtctttgagatttgttttgaccccagggggactctccttagccatcactttccgtagttctttgtggtgaatttgctgacctatgttttagtttcttgcctttaatgaaggagagctaccaatctcttcttatttgcttatgatcaaaatatccaatatccattgttttcaagaacactcttagacttatacttccccacaccactttgtttcaaataaagtcagttctatggagagcttcagagctcttttttcttatgaattacctcccactctgggcaaactcttttaagcacaattccaggcacttgggcaggggcagtagcctctcaacttctcagtttccttcttccttaatcctccccacccccagagcttttgccctacaagtaagctggaatgaggatgattctagtattcttgggctgccgcttctgggataaagtctctgccctatgagtggagggctagatggaaaaagggagccaactttttggccacactcaccagaaatttagaggccttaactcagagttggaagagataagaaatgctgatggcctgcagctgctgctgcttttttttttttccataactcatgcatttttattggtaggcatttcatggtggtgtaatcatttatgcattggaaaatgggattgtttttgatgatactaaacagcatttatttctttattttattttattttattttattttattttattttattttattttattttattttattttatttttttgagatggagtctcgctctgtcgcccaggctggagtgcagtggcatgatctccgctcactgcaagctctggctcccgggttcctgccattctcctgcctcagcctcccgagtagctgggatgacaggcgccggccaccacactcggctgatttttttgtatttttagtagagatggggtttcaccatgttagccaggatggtctcgatctcctgacctcgtgatctgctctcctcggcctcccaaagtgctgggattacaggcgtgagccaccgcgcccggccagcatttctttatttcaaatgcattgaatgaccaccatgtgacaggccttgcactaaaataaaataagtatgcaataagtaattttttttttgaggcggagttttgctcttgccacccaggctggagtgcaacggcacaatctcatctcactgcaacctctgcttgccgagttcaagcgattctcctgcctcagcctcccaagtagctgggattacaggtgtgtgccaccatgcctggctaatttggtatttttagtagagatggggtttcaccatattggccagcctggtcttgaactctggacctcaggtgatccgcccacctcagcctcccaaagtgcaggaattacaggcataagccaccgtgcctggcctgcaataggtaatttaacatgtaggctgtattttttttaatgtaagcatttaaaaagattttccccttatgcagatatcattgatgtgcctttccattcaaaaggctcaatatcttttttttcaatttcattaaaaaaaatttaatttcagtagtttttggggaataagtggtttttggttacatggataagttctttagcagtgatttgtgagattttggtgcacccatcaccacatcccttgattgagagctagggtagagggagccctatcttcttggccaccttggtctagagtggagcctccataaaacttggctggaagggatggggggagaggtcagatcatggcttaagtgtcatcaatttctgctgttcttactgaattttagtagattttcttgaacaaatgtttcttcatttgctgtgcactctcagaataatttctagagactttaaattatttttaaaacagttttcaccacttatgcttatttccctagggagaacgtccgcagagattatcatgctatcatccaggaagtgaaactctatgtaacttctttattaaattctatatgtattaatttaaagacattttcagattattatgtaactttcatctttttctcaagtgaattcacctcctagttgttaattttaggaagtctactgattttatgtttgtttcctcatatattttggaatgttagcttaaaagctcatctttagtgggaagatctgtcattctctttgcagtctaagttctatgattgtctgtaataaatccttctgtggcatccatttcagatccatgtcttctatcaccagctttgggttgttgtctaataatgatacaagtcatattgcagatccagtcactgaaccagtgggtacttttgcccaggtcccatttctgaggttgtacttcttcctgtctccctacgtatgcagctttatacaattgtaatcataagcgtttgctgcgacatttgtgttttttggctttctctcttaagtgcaaaaactttacctcagcccacagtttcaagccttaaatatagctctggttcccttcctcatctagggtacttttagacaccattacctgctatcttatttaaattcttactactttatatttcttttctgtgtctagtccacagacaggttacccctttttgtatgtgtatgtttgtgaggtatattcgtggctatatttgtatgtgtgtgtatttttacatatgctattacatgtgtggagaaatgtttctgaatcatgaccttataatgtcagagttgcaagagtcttcacatagatgttaggataaaacattcacccaagatgtgactgtaaccagcaaaaggatccgtccggctgctagctgcttatgaaaagaattcaaaataataacaaattatgataagaaagagcaatattctcttattatctgtgccagcaaggggaagagcagagacccattctactcttcaatttgtggaaggaatgcgggggtttttattttattttattttttatttttttattttatcattattatactttaagttttagggtacatgtgcacaacgtgcaggtttgttacatatgtatacatatgccatgttggtgtgctgcacgcattaactcgtcatttagcattaggtatatctcctaatgctatccctcccccctccccccaccccacaacagtcccggaatgcgggggtttttaaagaaagggtttgagatgcagaataggcaagaggggctaggaggtgccaggtggtgtgacttgctccagtggcccctcttgaattattgtcccatgtggtgaaggggctggtgccatcatggatcctgccaggttataaattagttgcagtcaatcttgtagtcactctacagcctgaagtaggttctgttcttgaagtaatcttgttggggagagaattctagaggtacctggtccctatcaggatctgactctcgaagcttctaagaaaacatatgaccacataaaagaacatggcgtgtacttaaaaagcatttaggtaaataaatgtgcataaggtatgggaatatagtatgggaaaggaaaggcagtggaggctcacagcacattccaaggctgtatttcaagataagaggtaacacatatgcaggttgtctcaaagttgtatcttgagacttggaggggaaagaggaagaggaaaagaagaaaaaaatgtttaaaacacagttcgaggctcagctgccaagctgcttggttacatgactgtacacatccttattagatattcctgtaggtcatcagaacaaatttatttttcagttttatgtagtgatatgttttattatttttctttatgtcttttagtttcctgttttgctaaggaaactctctgtaccccacatgatagcaagttatttttcaaatttttcttttaaaatgtttacccatttatttttacatcagaatgtcataagattatatattttatttttactatattatggcattgtgtaccatttattaaataatttattatctagccattgaattgaaagagcacatttaaaatatattaaatccccatgtaaattatattaaatctccatgtaagttttatttctgaattacttgcggagttttgtaccagaaccatactgttttgattatgtatctttgtaacaagttcagtatctgtttcctctagtagttttcccagaattatattatgttgagtttttccaggagcagtttctaaagagaaaaaagagtaataatgtcaaaggcttattctcatgacaaagagaaaaccaaatagcattcaaacttctttcatcttaagtgacatgtccaggaggaatattaattctattctgggctctctgtgttaggcctatgagctccatcaggagaacaagaagcccacgagccagagagttcaaagtgtggaaattgacatgttctctgaagatgagcctcatctgaccatacaggatccccgaaaggtaattttcctaggatgttgtcagaggaacttgtggctcatccacacaccttctccaggatagttattatggaaaaatggcacaattaatgcagagaaaattgcaagaatcgagttttgagcaaaagtctaggccaggtttctcaactttactagtatgacatttgaagcaggacaattatttgtcatggtgagcttttctgtgaattgtaagatgtttatccatatccttggcctctatgcatttgatgccagtagcatccgccagttaaggtaatgaaaaatgtctctagacattgccaaaatgtctcctggagggccaaagaaataagaaccactggtctaggcctattattccaggaggtgagacagtggaaaattatagtctcagtaaagtagccttcttctcatcacataattggagttaggcagcctatcagggttatgatctgtagggagaaaacgtggaggtactgtatcttcatatgcattgctattcctcagctatagagatgagctagagagttctcttctgaagtcaggctggtcatagcacttagaaaaggacccagcaggaggggtgtttcttgacacctctcatcctagaaacctttgcctagttcatttcatccttaaaaaatcagacaatgagaaactccgtactactatggtgaaagaaggtcttagtaaaaggcacccccttcgttttgttctgatgtgcagaagtctgatgttaccagtatactatcagaatgtagcaccattgatcttcaggatggctttggatggttacctgagatggttcccaaaaagcaaccagagagatgtttgcccaaaggtaagtggcagtatttctgcatccagttcacagaatctttggatggggtttctgttcttctttgaagctctgtggttttagtagatatcatctttctacttctattggagacaaaagcaatgagagggcacccgtagattcttgaggcgattgtcggatctaggcagaggggatttcaggaaattcttgctttaattgggctcctctcacatggcccaaaatgccaggtaaacactctggaaaactctcttagaaagcccactgggccaatatgtctgccactttctatggttcccagggcattcaatgtcagggtgtatttgaggtgaaagaccaagaaaagagtttagacattgtagtcaggatctttagcttagaagccagactgcctgagctcaaattctggccttgccacttatgagctgtgtgacttgttcaatttagttaacctctctgtgctttatttctaaaatgagggtaataatagtatccaaagcaaagagttgttgtgactattaaatgagtgaatataaatcacttagaagagcatctggaacaaaaataagcaatcaataaatgcaggctttcctaattccttgagtggatatagtggctttttcctataggcctttactatttgttatattcattgtagtgaacttatttgcactggtttcccccatgaggtccttaaaaacaaaggcagtgacttcatcagcattgtatctctagtgtaagaatagaagccggcccagaaatgggttcaacaaatgttgataaataaataagtgaaacaaattaatgaatgaatctaaaaaaattatctataagtttaggattaaattgggtccagaagcaacacaaataacaggtttcaaactcacattccaggttgcttaacagctccaaagctggacaggagttggattaaggatttccagtagattgcagttctcctcatttatgtttgcactggctcttgaggtgtgcatatgatgtcaacagtggagatgagaaagaaaggtggttttatcaaagaagggaggagtgggataaaagccaggaaaaaagtgtagtcttttaggaagatgaacctactgatgtttttggaagaagaaaagaggcagagtgaagagagcccatagtggtttaagaagatgaggaaaggagcagaatgttataatcatcatgaataaggatcagcagaatttgtacaaggggaggaggagaaaaggtggaaagggcaatgtggtctatattgaaggcctgtgtgtgttcagaacaaatgctcagctctttgtaaacgtctcgacatttgatcaaattctttcgtgtatgacctgagaggttcacaaagcctgtggccatcctacctcattccctggagtcctccagacatgatctctttatgattaccaaaaaaattgctgcataacaaacaactacaaaacctcagtggcataaaatagtaaacatgtgcctgcaggattcagctgatcttgattggcttcattcatgcaagtgttatctagcctgggctcaacagggcaacatggctctactccacatgtctatcatcctccttccagacccaatggggtagcctgaatttgcctttttttatggagatggcacaagacagcaagtggaagcatgcaaggcttttcaagacctgggctcagaactggcacagtgtgacttccattccactctattggctaaagcaagtcacatggcagggaccagatttaagatgttagaaaaagatgctctacttctttaatgggagcaactgcaggtcgcatggcaaggggcatgaacacagaaaggggtgaagagttgcattttaatgcagtttattacagacactaatgatagtgctaccattaattcctttcaggctttggttgctgctttccatgctgtagcgtggacaagagaaagcctccctgggtcatttggtggaacctgcggaaaacctgctaccaaatagtgaaacacagctggtttgagagctttattatctttgtgattctgctgagcagtggggcactggtaaatcatcattgtcttgtggagacattgggcatcagggcagctggggaagctgcactctgacttggcttctcgtgggactgtgaatatgggagaccagacagaagtggtctctgatgctgctggttcccgcagtgggcagggttttgcacagcttctgaaatcgtgctcaactgggatatcaccaagcaaagatgctttatctgtgtggaagactaactaaaaccagcactttaaagtggccactagagtctggtccttgatcatctacctctcatttttgggggatttctagacattttcactgtatcctacatagttcttcctctagacagcagtgcttctactctccctgttaccataagccatagtgctgttttctgaaaggtaaaatattatgggagggagttacagggaccagattaggatataataagttgccttggtattttctgtcattcatgatcccttgaaagaaaggacaaggagatgttgctttatatgcatggtcaaagtgtggtatgagtcccaatgagatttagaaataactctgaacccatcagcttctatagccatagagctatccactcctttatgctctctctccacaccttctggtccttcttgtctccctttctcctccctgctagggagggatagtatcttttctcttatcacctgcatatttcgccctctccttttctattttctgcttttttctatcatgcatcttcccttaaaatgatcatacagtaatgtggagctaaataatagggaaccaaattctcttactgtttgacataacaaagttatgagtttgttatgagagtttggttccatattactaaacccaggagccttgggttctcccctgctaagagtgacagaacatttcacagtgaatcactagcaagtggaaaaagacaaggaaatgtcttgctcctacaccccatagcttctggttagtgttttacacttgtgtgatctctaggtgaaaagagatgaatacataccagagcccaccggggactgtgatcaacatacatgtccatttgtctacttactacagtgtaaattattcttcaaatagaaaagcagatttctctaaaaccatcccagagaattcccttaataaatttttattgttaatcttgggtctagggttacctgtagactttctggtgactacattttcactggctgtctactgttactcaagtgtagggtttcttgtatttattccacaaatggtacttatgatataggcagtgggaaagcagtgacagtgccaaaaggccacagcaaaaatgccccatggtgccataaaaagaaaatgtatgatcagaaatgtagcagagggcacacaactccagttcttatctgccttcggaaaggcaggtgtaggctgggcagagcaaagctgaacacacaatgcagagggtgccaggggaaggacccagcccatatttctctgtacatatttgtagagaatgagaacaagagacatcaagttgtttgccactatatgtgtctatcagcagcagcagcagcatcacctggaagcttgttagaaacgcagagtattacattgtaacaagcagtccattgtaacaagttccctaggtgatttggggttcattagagtttgagaaactctggtctaggcaactatgtaataataagagcttcctgtgtcagaaaatggcctagatataatgtggaagcctctgaagctcaattgcaggtataagcgtgctcatccattgagctaactcagatctgctgaaccagcttactggtaagcttcccaaataagggaggaaatgagcacccaataccattcagatttgtttatcctcaagaggcaaacaaacgaagtccctgacctccaggagcctgaagtctagtaggaaagacagctggagtgattatagaccagaaagtatagatcaagatagatagaacaattaagtggtctactcagggaagcagtgggtgacatgggagcatgtaggatgggaacctaacccaatcctgctggaacgggacagtttcctatagaaaatatcagctaagctgaaatcttaaagctgaagagctgaaagagcagaggatgagatagagggccttcttcagccagaaaccaatttggcaattggaagtgagactgttttactcttttgcattctttttttcaccccaggactttggagctgtgggcttaccctagtctccaacagcaaggatgattcccttcctgccttcaatgttgacgtaaatttcatgggcagctttagtaacaggccgtcttcctttctttcattctcagtaactctgtaaaggccaaaaggacagcttatacgctagttatatagaccctgtagaatcacatacagtttgcgtgagggaagtgtttggatgtagcattaaaaagggtctctctgaaagccaggatctctttttcataattacaaataacaatgtttaatattcaaagtaatttacactgggagctttagcctagagtgttccaaattttgttaatgtcatggcacacataagaaatgacactatttgtagggaatggtaaggtaaatggataaggctgtttgtagggatagatgaggggcatcagggttggcaggatttagagaacgggctaaggcacttggacttaatgttataagcaataaagagacactgaattaatccaccaaggcaattgggaggatgagagatggtctatgccactgggtggtcctgggaatgttggcaagacatatttggcaggagttgaaaagatgaggaagcccaggaaataatgtgctgatccattaggaagatgttttaatattcaggggaccagtaataagcagttgaggaactattgtgacaacagaagaaagaagattttccttcttccatttttacttactcaaggaatggattccattggaaaagtttagccttaatatcttttgagcagaacctcattacgaagagagataccagtttttattcatataaggaagaaaaacaaaaagtaaagttaccaaggagttctttgcaaatattcaacctggcctatggctatgctttttcatttcagatatttgaagatgttcaccttgagaaccaacccaaaatccaagaattactaaattgtactgacattatttttacacatatttttatcctggagatggtactaaaatgggtagccttcggatttggaaagtatttcaccagtgcctggtgctgccttgatttcatcattgtgattgtaagtttaccatctctgtgtcccacacaggctggggtagtggttaaggcagggatcatatggaggctgcttttcctgtgtgccgcatatggatgtctgtctaaaatagtttttcttgttatcattgcctcttcacagtacttgtaagtagttgtcatttgtctgtaagcagtttagcctttcctaggtcccgctcatcatacactacactttatatgctcaccactacaacctttcccatgatgggattcattcacttctctccataagcactgtttatgtataatatgtacctagaataactttcagtatcctcgattttttcttcttccaactttctatttcttttcaagacttctcaaagctggtcagcagccaatagactaggctaatatccatcttaattgtcaagcagcataagaggattgttcacatacagtctctcatttaatatgcatgacaatgttctgaattaagcagcattgtatgacacctcccacactgtatacaaggaaacctgaagctcagaggattatcaatttgtttcaggtcatagagctgataagtggtgaaattgggattcacgtgtctagctgtatgacacaaaagctaataatagtattagtggatcacatttattgagtgctttctctgtatcaagtactcttccatatgctccaaatgccttctctcttttagttgtcatagccactctgtggcaggtgctactatttttgtatattcagagaaagaaagtaagtcatagagaggctaagaaacatgttcaggattgcccagctagaagtggtggaggtgagatacaaacctcgtaagcctcactccaaagctcttgatttaacattacatcctttttttaagattaattttatgtttactgatacatagtagatggacatattttcaggatacatgtgattatgtaatacctttatataattaaaactggtgcaacctagtaagtctcactccagggcccttgattttaacattacctctttccatcatgatgtaattagttaaactttgtccctgctatgcaaggaagtagataagacaaatatctgagcataaaccatgtggtcaggaaaccccactggagaaccataatgttgttggttagcacaaatagaccatgtgttcatttaatatggacatcaatattctgagttaatcagtattacatgacatctaccacattactaacaagaaaaccagaggctcagagacaaggaaacagaagctcattgtggttcaggcattttagaaaggtataaatgccatagaaactacaacaggattcaaagatgggaataaaaacatccacgtttgtcagtcctattaatttctagagagcaaataactctgtacgtattatcttaatagattatagtaaaaagaaaaccctaaaaactgtgtgaacagatgattgttatctccattatagggaactctgttttaccggatacaagccctacatttaggagcctgggtcctaaagctaattggtctaccctctttttgtgtaaccttaagcaaaacatttcccctcttttgacaataattttctcacaggtaaaaatgaggatgtggactataaattgcccaaattcactgaatacataatagaaagctagtgatagtttcactagaaatctagtgatcgccattaaaaatatcaaaacagttgtccaaagccacactgtcaaaaaagggtaccaggctgagatgggtgggtttatttatttatttatttatttattatatttcaataggctttcagggaacaggtggtgtttggttacctgaataagttatttagcggtgatttctgagattttggtgccccatcgcccgatcagtgtacactgtacctaatgtagtcttttatccctcacaccctcatttcccctgagtccccagagtccattgtattattcttacaactttgtgtcctcttagcttaggtctctcttatgagtaagaacataaaatgtttggttttccattcctgagttacttcacttagaataatagtctccaattccatccaggttgctgtgaaagccactattttggtcctttttatggctgagtagtattccatggtgtatgtatatagtatataccaaagactatatatatatggtatatacaccatatatataccatatatatagtatatacaccatatatataccatatatatagtatatacaccatatatataccatatatatagtatatacaccatatatataccatatatatagtatatacaccatatatataccatatatatagtatatacaccatatatataccatatatatagtatatacaccatatatataccatatatatagtatatacaccatatatataccatatatatagtatatacaccatatatataccatatatatagtatatacaccatatatataccatatatatagtatatacaccatatatataccatatatatagtatatacaccatatatataccatatatatagtatatacaccatatatataccatatatatagtatatacaccatatatataccatatatatagtatatacaccatatatataccatatatagtatatacaccatatatataccatatatatagtatatacaccatatatataccatatatatagtatatacaccatatatataccatatatatagtatatacaccatatatataccatatatatagtatatacaccatatatataccatatatatagtatatacaccatatatataccatatatatagtatatacaccatatatatagtatatacaccatatatataccatatatatagtatatacaccatatatataccatatatatagtatatacaccatatatataccatatatatacaccatatgtctctttctctctctatatatatatcacattttctttatccactggttgattgatgggcatttgggctgaatccatatttttgcaattgcgaattgtgctgctataaacgtgtgtgcaagtgtctttttcatataatgatttcctttcttctgagtagatacacattagtgggattgctggatcaaatgacagatctacttttagttctttaaggaatctccacattgttttccatagtggttgtactagtttacattcccaccagcagtgtagaagtgttctcttttcaccacatccacgccaacatctatcattttttgattagtgccattgttgcaggagtaaggtggtatcacattgtggttatgatttgtatttccctgataattagtgatgttgaacattttttcctatgtttgttggccatttgtaaatcttcttttgagaattgtccattcatgtcctttgcccacttttggatagaattatttgtttttttacttgctgatttgattgagttctttgtagattctggatattagtccttagtcagatgtatagattgcaaagattttcacccactctgtggatgtctgtttactgtgctgattgtttcttttgctgtgcagaagctttttagttttaagttccatctattcatctttgtttttgttgcatttgcttttgggttcttggtcatgaagtctttgcctaagccaatgtctagaagagtttttcccatgttatcttctagaatttgtatggtttcaggtcttagacttaaatccctgatccctcttgagttgattttcatataagatgagagatgaggatccagtttcattctcttacctgtagctatccagttatcccagcaccatttgttgaatagggtgctcttttcccaatttatgtttttgtttgctttgtcgaagatcggttggctgtaggtatttggctttatttctgggttctttattctgttcaattggtctgtgtgcctatttttataccagtaccatgctgttttggtgcctatggccttatagtacagttagaggtctgaaaatgtgatgtctccagatttgttctttttggttagtcttgctttgggtatgcaggctcttttttggttccatgtaaattttaagattgttttttctagttctgtgaagaatgatagtggtattttgatgggaattgcattgaatttgtagatcgcttttggtagtagggtcattttcacaatgttgattctacccatccatgaacatgagatgtgttttcatttgtttgtgtcattgatgatttctttcagcagtgttttgtagttttctttgtagaagtctttcacttccttggttaggtatattcctaagtattttattttattttattttcagctagtgtaaaaggggttgagttcttgacttgtttctcagcttggtcactgttggtgtatcacagtgctactgatttgtgtacattgattttgtatcctgaaactttgctgaattcatttgccagttctaggagttttttggatgactctaggattttctatgtatacaatcatatcatcaagaggcccagatggttttgcaggtaagttttaccaaacttccaaggaagaattaatctcatcttattcaaattgttacaaagaatagacaaaagaaggaaagcttgcaaatttatttaatgagataaacataatattgataataaatgaatagaacagaaatgaatcaaataagaaaataatcttacaattatatatctttgcaaatcacagataaagcactcaacaaatgtggtttactattactattattagccttgacatcatgcagactgtggtgtgaatctgaaattcaccacttatcagctgtatgacctgaaacaagttgctgatcctttgagcttcaggtttcctcatctataatatggtagatgttgcaaagtgctgcttagcttgggatattgttgtacagattaaatgagagaatgtatgtgaacagttctataatatttattgtcaatcaagattatataaaattaccatcataatttttattagaaaagcataaaccacaaaaagatacacaattcaactacatcaaaatgtagtaaaacttttatttttgtattcaacaatactctaattacagttacaaaccaactagaacctgggagacagtattttccacaacagatcattattattcacaacatatacaaatttcctacagattcacaggaaaaaacaacccagagtaagaatgggagaagtatacaaacagccaattcacaaaaggaataaacgtatgatgaaatatacactagttctatcaccagttagcacagaagtgcatattaaaatgagaggcctctttttactcattagattggaaaacaaaatatattgttttgaaacatggtctcactctgtcatccaggcttgagtgcagtggcaacctctgcctcccaagctcaattgatccttttgcctcagactcctaagtagctgggactacaggcgcccaccaccatgcccagctaatttttgtattttttatggagacagggttttaccatgttgcccaggctggtctcagactcctgagctcaagctatctgcctgcctcagcctcccaaagtgctgggattacaggcttgagcgactgtgcccagccatggcaaaaattttaaagttggataacatcgatatttagaaggatataggaaaatgccatggcaaaaattttaaagttggataacatcgatatttagaaggatataggaaaatgcgatctcaaaccactgctaataatttaattggtacagccactgtagggaatatttcgcactatattaagtaaaaatcacaaatgacccaactcacaatccacaaatatcacttgttatagatccaaggagaactcttgcatatgtacccaagaaaaatgcacacatctgcccagtgtactgttgtgcataatactgtccagtgtactgttttgcataataggaaagaaatggaaataacctaggtattcaccaaggaggaatggatccgtaaaacatgaagatttatatgctgtactattcctcaacagttacaaggagcaaaccataagaatataatcaacatgatgatttcaaaaacagtgcagagtgataaatgcaagttagattttaaaaataagataaaactagtagaagacttctcacttgaagagtacagtatggtgggaaagaatgtgggtgtttctatgtgtctcactgatacctgcaagtctgatggaacagaaacttgggtaaggtttaaggtaaagaggtgtataaggtctctgtaggaacatcccttctcaccaactatgacaatgatttggtaaaacagaagaattgctaaactttgccatctgttttcatctggctaggaataagtggagtatttgcgagaaagctacttaataacttaataacttaaataactctccaaaagtggtgccattgtaaacaaaaagcccactaaaaacattataaatacactgtaaattgattataaatttcaaaatcttaatattctgtcatattaactcaatttctcttcactactacaatgaggttggcaagatttgtgaggaatgtttttaggtaatagtgaactctgacatcagcttagtcaggactatcctgattcacttcctatccagctgagcaactcttcttccaagctgagcctctgaaaactctccataataagaatggctgaagatctgcagcaagcagattcaactcaagctcagcattgattccattgtgataatagaagcaaatcctaattcctcatatgaaagccaataccttctcgaattgtcctctactgagcatctgtaaatattgttaagatttaatttggtatacttaacagagctttctaatactcagttctgtcctattgagaagaagcatattgggagagaaaatagcatttaattccccaataaggagctatttggattaggggaaatattagcaaataatttattttttccatgtaactttttattttgatatcatttcaaactaagaaaaatgttgcaggaaatagtataatgaaatccacatattctttcttcaggttcaccaattattgtcacccatctgctttgtcatttttttctctctttttttccccctaaactgcttgagattaagttgcaagcatcaaacctattacccctaaacatgtcaatgtatatttcctatcaaggacaatgtctcacatgattacaatacagtgatcaaagttagaaatttaacattgattcaattaaaatccacatccattttcaaatttttcaaattcaccataaagatctttgttatggcaattgactatcataataaatttcaattgactgccataacaagattctttatggttaattccctttatgcatccacctcctacccccactccaatccaggatccaattcagcaccccagattacatgtgattgttatatctctttgctttcctttaattcacaacaatttctcggattttctatgtctttcactaaacaaataacgtgagtgcattgttcccacgtttatggactgtagctttggtagataaggagaaaaatggactttccagctggacaccaagtcaggtacattatctgtggcctctcttcccatcaggtctctgtgaccaccctcattaacttaatggaattgaagtccttccggactctacgagcactgaggcctcttcgtgcgctgtcccagtttgaaggaatgaaggtacattctgcagaagaatgggtagaagttcagttaacagagaaaggtggaaagaccaacagttctttttgggctgagatttccttaaattgccaagcttttcctgggttacttcccagcctgcccagtgcttagaatttgaggggtagagaaaagcctaagatatactttctaccctaaaagcttctgtgacagccaagatgagctgtagctttgcctcagaatcctggggtaggtgtccataagtctctaacactgtcatcaccagggcacttctcaaggtatcctcagtggcaacagagaggacccattatgtagggagctgagagcagggcttgtcatggggatggggcacatgtatgtggagattaaggacagagctccaagagatcaagccctgcacatcaggcccatgctgagaagttgaagagcctggtgcatcctacccatctgttatggttttctttgcttttgtttccataaggtggtggtcaatgctctcataggtgccatacctgccattctgaatgttttgcttgtctgcctcattttctggctcgtattttgtattctgggagtatacttcttttctggaaaatttgggaaatgcattaatggaacagactcagttataaattataccatcattacaaataaaagtcaatgtgaaagtggcaatttctcttggatcaaccagaaagtcaactttgacaatgtgggaaatgcttacctcgctctgctgcaagtggtaagtacagtcagtatgtttttcactctgaggagaaaaaccttcagagaatcatgaattgtttctcagctaataaaaatgcagtgactccattgtgataatagaagcaaatcctaattccttatatgaaagccaatgccttctggaattgtcctctactgagcatctgcaacttcattgactgctgagcctcagcttcctagtgatgcccctttaaggatctgtacatctcaccttgtcctgtatggcaccttgctggctctccacatctccaggcagagaggagtggagcctcaggtgtaggtcatgacactttgaacagttccctgtttaaagcacagttgccaggtcttgaacaggcagtgcaaatacatatggcatcagaaaagaaccctttaactcttagccagtctcttttcagctgttgggccacagcttcagcctctctggtaacttttaaggtggaaatttcttgtttttaaactttgtatcttgtacaaatgaagaagaagaaaaaaatccaagacacacacccttgagttcccttctactgttcttttatttgagcatcctgtcctagaaggttggggtatcatcttatatattcagcccactgggcctcacctgcttttccatgccatgtatctgttgatggcaagtctacatttgtattattcatgtttttctgcttttgttgcaggcaacatttaagggctggatggatattatatatgcagctgttgattccacagaggtgagtcagtgttctaccatgttctggagtgttatggtcaagtcagagatatcatgactacatggacagtccagaactggcgtcatagttccagcagctggggttctctgccttgttttctttggaacaaaacactatgagataccactgcctaatacaaaggattcttatgcatcctctagtgagtatctgataccccagtattctctgaagtccagtcttctttctccatggtggccaaggaaaaaccactcatacaggagatggagccagaagtggcagaatcacaggatgccttgattttcttcttccctcttctccaaatggttggatagtcagaaaccaaatttcaaagagtatctgttttagattgtgggaaaccttaagactgcactaaatttgcaagggagaccctcgcatggctccagactccctagtgatggccaactgttgaattttagagtttctagtgatgaccagctgttgaattttagttaaagaaaagataatcacagattcccaaagttggaattgcactcagtaatctagcctagtttctattttccagcttggaaagttgagggataaaaagaaagagtttcccaaagccatagagtaagcagatggttggctcaagaatggagtcaatggcagaaattattgtttcctattatagcacatgtgtgtgtttcgacctatttgggagtctgcagagttgatgcctaacacctaaaaagtattcagtacctgtgagctggtacagactgagtatcccttatctgaaatgcttgggaccagaagtgtttcggattttggagtttgtaagatttgggaatatttgcataatacttacagttgagcatccgtgatctgaaaatccaaaacgccacagtgagcatttcctttaagcatgacctttgcatgttatgtcagcattcaaaaagtttcagattttggagcacttgagacttcggattttcagattagggatactcagcctgtagtagcagtagaagtggtttgattagtgttatagcagcaccgagggataagaattaatctttatggccattccagttgtcattataaattcacagattgtcattataagttaatatacagatgatgcatagcaacaaatctgagtttgcttaattctgggtgtgtcaataaagtcaactttctggaaagacaaaggtaacagtagatacttaactgtttataacaattatagtttacattgtaatatttatatatacaatgtaattttataattatatatacaacataattttataattacaatttatagcaaaggaaatattttaaaaatactaatgtactcatttctttcgtcttttcgagtacatgaccttcactctagtttggctttgacatccatctgtgcggaggtggagatggggagtggggaggaaaggttttgcagatgtgtagtagacaaggtgtgtggcttgcaaatgctccaagagtgagtgacaggtgggtggaagtgtgtggaggggtgcctgttttgatgccggtcctgatatgtactggttgttgtatgctggcttctagcttgatgactcttgtctatatagtcacccagcactctgctggcctcaaatattgaagttgtggttgttgaaactgtgagcgttttccccgtcatctcctcctggccttaaatactggtactctgccatatcctccccatggtccctggcagtctactcccatcccttgctgcaaggcccaacatgacaggcccatggctatcaactccgtgtccaagccacatgagaactgagaggttcaagagacttctctctgttcaattatgttactcaaatctcttaagtcagcctgccttcctgatatatctcaggccttcccagtagtaattccttccaggaaatgcagaagtaaagcaagaataccctctttgccttccatgtttccctcaatttactgcattccaacccccctttccagacccaaagagggataatcaggacacacatcttgcagctctgattttctgtctctgtttatttttcctacatttcctatgaacaaattgggtgagctttgataatttcatcttcttgtctaaatctccctccaataaaactctccaccttcaaacctttgatttaacaaagagggacatgaaggagtacagacattcctatatctcaaagcagtaacctaacatgcaagactattagcccacttggcaattttattttaaatgtctaatgctaaatattctttccattacgttgtttctgtactaatgtctaccttttgttcaaataaatggatgcctcaagcaaacttggactaaagtcaggtagtcttcatagcaaaagagagaaataatgttttcaaataattaccttcattacactagtctacattgtgagtgttgaataacaaataccataaatgcattaaacattagtcagagctatcagcacttatatctttgatgtgatagagggaaaaaaagtgaaatctttttgccacctgcctgaaagtgcttgaagccaataacaatgcaaaggacttggatgaaagggctcttaggtgatttgggttgtatcttagactaggagagcttggttggagtccatttgtgtccattttagagctcgatcatttattcattcatttagatatttattccatgtgtatcaaaaatctacatatcagaaggtatgctaggcactaggaagttaagagtgaaaggacattaccacatattaagtaaagcagtgggctctatatgggggtcatagtagttcaacaacacttagtagtttagtcacctctgcccaaggtgaacgtgcccctcctctggtggcctcacctccagtcaggttccctccagttacatacccatatggacattccatatggatgactttttaaaaagacaaatgtgatcataccactcatctcccttacagtccctcaatgattctcctttgcttagaataaaaagcccgattttccatcaccccaggtccccgccacatgccatcactcaagctgagctgcaaaaactgaaagacaggctcccaacaggggctatggctgttaggaagaggctatgtagtcaatgttgctgctaagaaacaccttggtcttctagataaggtagttagaatgcttatatttttctccagtaattgtttttttctcttattaaaaaaatttctaacagaaagaacaacagccagagtttgagagcaattcactcggttacatttacttcgtagtctttatcatctttggctcattcttcactctgaatctcttcattggcgttatcattgacaacttcaaccaacagcagaaaaagataagtatctgggttgtcttgatttggtaattttatctctgtcctccaaatgcattaacaaaacataattctggcctagaatgttatacaaagtagcctttatgatctgcacaataacaaggagggagcctcccatgtctgcctggagatgatcctcaaagatgaggctgaaagaagactgaaaacatctgggtttaattaagtcattacttttattctcttttaccttcttaatcaatggacattgctactattgagatgaaacccattaataactgaaccctaatagaacaacaaccaccaggattagtatttattaaatatgacactagggtcatattttaataacctttcaaatgcactttattatccactataaaactaatatactctccttttcctgccagtgtgtcctggcccccagcacccaagcctcagcagatctatccaccctactcggaaagaagatgattggggaagaggcagggctagggaggttttcttccctatgcattgtaataaacacatgtttattttgctgattctaaaatccacaggagctttgtagtgaatgtggaaaatcaagataaaaagaaaatttaaatcacccaaaggtggccaccaaatgataaccactttagaccatgcctcttatgattttgatataatccattccagtcacttcgtattacttttacacagttaggattaccttatatttttaattttgtagttttgacctcattagttataagcttatgtcataaaattaactttgctataagaattctcagagcctctggcagggcgtggtggctcatgcgtgtaatcccagcactttgggaggccaaggcggggaaatcacttgaggtcaggagttcgagaccagcctggccaacatggtgaaacccagtctctactaaaaatacaaaaaattaaccagctgtggtggtacacgcctgtaatcccagctacttgggaggctgaggcaggagaattgcttgaacctgggaggcagaggttgcagtaagccgagatcgctccactgcattccagcctgggcaacagagcgagactccatctcaaagaaggaaaaagagaaaaaaaaaaaaaaggaattctcagggctgaattacattgcatattatggatagaccataatttatcctgatcattcccctctttggacatttataggttgtttttaaatttcttgctcttctaaaacaattatgaccatttttaaaattctgtgtatctctgattatttcttcagcataaattcctagaattacaatattaaaagcattgaagacatattgtcaaaataccttccagaaatgctgtgctaggtacccttattctgcagaatatgaaaatgcatggttactgagatctcatcattctaattgttatatatttattatcttttttagactggtggggaaagtattatctcattgttttatatttatttatttgatcattagtgaggttacacactttttcacaggttgatggccacaagtatttctcctttaagagttttttatttatatcatttgtctatttttaagtctgagattgcatttttatataagtccaatttgtgacatgcatcttatatttttgtaataacatatttaacttatagacattagtatttttcagagtcaaactcccaatcttgttatttttggcttttttttaattgtacttatgaactaaaggcatttctcaatccccaaatcaagtaactaaatattctcctttggttttcctaattgttttatggctttcttttatttttcctctggactctcataattcatccaaaatgtaccttgataccaattagccttcttagcatctgctgggaaagttgttccctgttgttacacaaactgtattgcttctgctactcaggagtgtgtgatgtagcatcctctctgtaatatgcatcttgattgctatcaatacctgcaatttggatgtcagtctttgtgattttagatttaagcttacattagaaatcatcgttttgaacaatccactatatccttttgttttgtcttgttttactttttattacagaaaatctcaaacatgcataagagtgtactagaattaacctaaaatacccatcacctagcacaacatttattgacttaagaatgtgcttgttctaagccatatacgcccttactcaactctgccaccagatttttttttatggagcaaaccacagacatcacatcatttgattcataaatattttagaacacatctctttttaaacataaccacaattccattagtacaccaaaaagtttaatgtgagttctttaaattcatcaaataccgagtctattttcaaattggtctgagcctttaatttaaaagaaaaatgtttatttattaattctgtgtttcatttgcttatttgtttctgttgaagctttttgtttgtttgttttcaaatcaggattcaaatacataaggtctttccatttgacaactttcttgttctctgaaatgccacgatgttccaagtttaggttgtacccttcctgccctagttctgtaatcagctatttctctaaaaactgtttgtttctttgtgggaaacggtttccaagaccacagtctagaatgctcattgtcattgtttctaagcctttctagtggacagagttgcttaaaattcaggactacaaggaaatatataagtggaaatttgcatactgattactcaaattcaggactacaaagttttcacttaacatctatatctccccctttccacactgagaaaccttattctcaaaggcaaagatgatagaatttaaaatttccacaattactcattttctttatctcacaacacacatacacacactacagtctcagaatagtggtattaatactactatgacatatatgattactaaaagactaatttcttcccagcatcccagaacaacttgattaatttttaggttgacttctagggctacatatttttatctgtgctggtggagtaaagtcaaaccccaaaccctcatcaaagtaagcctgaagtcacaaatgatcagggaagactggctttttactcatagtctggattgagacaattttctggttgtcttccattaccaacagacagattcgggtttttttctttacccttctgttggccacctttggatagtcccatattcttgcaaagacatctgtgcctctcctgtctttgcgtaggccttatttcccattacccccttacatttactaaaaactgagattctagtttacagagattagtaaatgttctaagaccagccatggctttgggctaatttactagtctatctttttgatctctcaattttcagacccccaatttttttcttacttttatgccagttcagctttacattttaaaagaattctgttctagtttatctagcctttctaaatattttgcccccaaatttccagatatgagaatcctagttcatttttctattctttcttgctcagtagtgaaaatagttagaacttttttttttccctgagagtggctctgaacagattttatgcagctttgttagtagtgttatgtgtattcattatttaagagaaattcaattgccctttatgagatgtttgtctaaatttttgtactaatttctatttttgttgcatcatggtttgatttatgcaagctgaaatatatcaaatttttgtaaagattctgtgtatatttgcgaagatttgtaacctttctgttctaaaaagtgaaaaataactgataaaggtaactttatttctcctgtataccttaacttaaatcttgtttctttacagcatttcgctatggtccagtctcttaagcttaccattgaaattttaagaattgttaatagaaatgtaatgtaactttaaaattgtgtcaaaaaattcagaactagattaaaaaaaaaactgttaaaggtaattagctcttatcttctccatatacttaggtggccaagacatttttatgacagaagaacagaagaaatactataatgcaatgaaaaaattaggatccaaaaaacctcaaaaacccattccacggcctctggtgagagcaattgaatgactgtaaatatgtagaacagttgagttactgtgaggaactcaaatttccgtaatgccatccttctttattcttaaaatttgcagacattaaggactcaacagaagtcaagacatattcaaacacttaggaaaattagatactcaaactcaaaagtaagagcctggacaacaacttaaatttatttttgagtgagccaggcaatatgtgcttaagtaaatacttattgcgaccatgtgaacttagtggtttgtttgaacttaattttgaccagtttattttattttatttcagtagtttttggggaacaggtggtttttggttccatgtgtaagttctttagtggtgatttctgagagtttggtgcacctgtcacccaagcagtgtacactgtacccagtgtgtagtcttgtattcctcaccctcttcccacccatctccttgattccctgaagtccattatatcattcttatgcctttatgtcctcacagcttaggtcctacttataagtgagaacatacaatacttgattttccattcctgagttacttcacttagaataatggtctccaactccatccaggttgctgcaaaggccattatttcattcctttttatggctgactagtattccatggtgtagatataccacattttctttatctgttctttggttggcaggcatttaggttggtttcacatttttgccgttgcgaattgtgctgctacaaacatgtggtatgtgtaagtgtctttttcatatagtaatttcttttcctttgggtaggtacctagtagtgagattgctgaatccaatagtagttctacttttggatctttaaggaatttccatactggttttcataatggttatactagtttatattcccaccaacagtgtaaaagtgttcccttttcaccacatccatgccaacatctattatttttttgatttttaaattatgataattcttgcaggagtaaggtggcatcccattgtggttttaatttgtatttccctgataattagtgatgttgagcattttttttctatgtttcttggccatttgtaaatcttcttttgagaattgtctgattatgtcttttgcctacttttggatagaattgtttttgtcttgatgatttgtttgagttccttgtagatcctgaaaattagtcttttgtcagatgcatagtttgtgaatattttctcccacctggtgagttgtctctttactctgctgattatttattttgccgtgcagaagatttttagtttaattaggtctcatttatttatttttgtttttgttgcatttgcatttgggttcttggtcatgaattctttgcctaagccaatatctggaagagttttcttgatgttatattctataatttgtatggtttcaggtcttagagttaagtctgatccatcttgagttgatttttgtaccaggtgagagatgaggatctggcttcattcttctacatgcaaattgccaattatcccaacacaatttgtgggatagggtgtcctttccccagtttatgtttgtttgctttgccaaagatcaattggctgtaactatttggcttttttggggggttctctattctgttccattggtctacatgcctgtttttataccagtaccatgctgtttcagtaactatggccttgtagtatagtttaaagtcaggtaatgtgatgcctccaaatttgttctttttgcttagtcttgctttggctatgcaggctcttttttggttccatatgaattttaagatttttttttctagtcctgtgaaggatgacggtggtattttgttgggaattgcactgagtctgtagattgcttttgacagtatggtcattttcacaatgttaattctacctatccatgagcaggggatgtgtatccatttgtttgtgtcattaatgatttttttcagcagtgttttgtagttttccctgtagagatctttcatctccttggttgggtatatttctaagtattttatttttttctgcagctgttgtaaaataaattgaattcttgatttgtttctcagcttggttgttgttggtgtatagcagtgctactgttttatgtacattgattttgtatcctgaaactttactgaatttatttatcagatctaggagctttttggatgagtctttagggttttctaagtatacagtcatagccttggcaaatagcaatagtttgacttcctcttttccaatttgaatactctttatttctttctcttatctgattgctctggctaggacttctgagtgctatgttgaatagaagtggtgaaagtgggcatccttatcttgtcccagttgtcatagggaatgctttcaaccattacctgttcagtatgatgttggctgtgggtttgtcataaatggcttttactaccttgtgctatgttccttctatgccagttttgctgagggttttatcataaagagatgctgaattttgtcaaatgctttttctgtgtctgttgagatgatcatatgatttttgtttttaattctgtttatgtgatgtatcacatttattgacttgcgtatgttaaaccatccctgcattcctggtataaaacctgcttgatcatggtggattttctttttgatatgctgttggatttagttagctagtattttttgagtatttttgcacctatagtcatcaggaatattggtctgtagttttcttttttgttgtgtcctttcctggttttggtattagggtgatactggcttcatagaatgatttagagaggattccctctttctctatcttttagtgttagtgtaaccacccttgccccctgcctagtcagagccaatttatcaagatgggggaattgcaatggagaaagagtaattcacacagagctggctgtgtgggagatgggagttttattattactcaaatcagtctccccgagcattcagggatcagaggtttttaaagataatttggtgggtaggggctagggaaatggggagtgctaattggtcaggtttgatatggaatcatagggggtcgaagtgaggttttcttgctatcttctgttcctgggtggaatggcagaactggttgaggcagattatgggtctgggtggtgtcagctgatccatccagtgcaaggtctgcaaaatatctcaagcactgatcttaggttttacagtactgtactgatgttatccccaggagcaatttgaggaggttcagactcttggagcccaggggctgcatgacccctaaaccttaatttctaatcttgtagctaatttgttagtcctgcaaaggcagactggtccccaggcaagagcaggggtcattttgggaaagatctattatcaattttgtttcaaagtcaagccatgaactgaattccttcccaaagttagttcagcctatgcccaggaatgaacaaggacagcttaaaggttagaagcagatggagtccattaggtgtgatttctttcactatcataatttcctcagttataattttgcaaatgcggttccataagtaggactggtaccaattcttctttaaatgtctgatagaattcagctgttaatccatctggtcctggacttttttttgttggtaatttttttattactgtttcaatcttgctactttttgttggtctgttcagagtttctatttcttcctgatttaatctaggatggttgtatatttccaggaatttatccgtttcctctggattttctaatttgtgcatgtatgtgtttgtagtagccttgaatgatctttcgtatttctgtggtatcagttgtactatctcctgtatcatttttaattgagcttattttgatctctcttcttttcttggttaatctcactaatggtctatcatttttatctttccaaataaccagctttttgtttcatttaccatttgtattttttttgtttcagtttaatttatttctgcttgatctttgttatttattttcttctgctgggtttggatttgcctttggcttgtttttctttctctaattccttgagatctgaccttagattgtctgtgagtgctctttcagacattatgatgtacgcatttaatgctacaaactttcctcttagcaccacttttgctgtatctcagtggttttcataagttgtgtcactgttatcattcagttcaaagaatttttaaatttccatcttgatttcattgttaacccaaagatcattcaagaggagattatttaatttccatgtatttgtatagttttgaaggttccttttggagttaatttccagtttttttccactgtggtctgagaggatacttgatatgatttcgattttcttaaatttattatgacttgttttgtgatctatcatatggtctatctccatgtgatatggagaatgctccatgtgctgatgaatagaatgtatattctgcagttgttgggtagaatgttctgtaaatatctgttaatttcatttgttctagggtatagtttaagtccattgtttctttgtttaatttctgtcttgattacccgtctagtgctgtcagtggaatactgaagtctcccagtattattgtgttgcctcattacttaggtctaatagtgattgttttatgaatttgggagctccagtgttaggtacacatatatttaggactgtgatgttttcctgttggactaatcattttatcattatataatgtccctctttgtcttttttaacttttgttgctttaaagtctgttttgtctgatgtaagaatagctactcttgctcacttttcatttccatttgcatggaatgtctttttccaccctttaccttaagtttatatgagtccttatgtgttaggtgagtctcttgaagacagtagatgcttggtttgtatccattctacaattctatgtcttttaaatggagcgtttaggccatttacattctacgttagtattgagatgtgaagtactgttctattcatcatgttagttgttgcctaaatactttgttgggttttttaaaattatgttgttgttttataggccccgtgagaattatgctttaaggaggttttgtttgtttgtttgttttgttttgttttggtgtatttcaaggtttgtttcataatttagaactcctttttgcatttcttgcagtgttggtttggtggtgatgaattctctcagcatttatttgtctgaaaaagactttatctctccctctttttatgaagcttagttttactggatacaaaattcttggctgacaattatattgtttatggaggctaaagataggaccccaattccttccagctggtaaggtttctgctgagaagttaactgttaatctgataggttttcctttataggttatctaattcttttgtctcacagctcttaagattctttccttcatcttgactttagataacttgatgactatgtgcctaggtgataatctttttgtgatgaacttcccagaagttcttcgagcttcttatttggttgtctagatttctaacaaggccaggaaagttttcctcaattatttcttcagataagttttatgaactttagatttcttcatcaggaagaccaattattcttaggtttagccatttaacataatcccaaatttcttggaggcttcattcattttttaaacttttttctttgtctttgtctgattggcttttaattcaaaagctttgtctttgagctctaaagttcttctacttgtcctagtctattgttgaaacttaccatggcactttgcatttccgtaggtgtttctttcatttccagaagttgtgagtattttttctttatgatatctatttctctggaaaattttcttatccatatcttgtattgttgtttaaatttctttaagtgggttttcacctttctttggtatctccttgattagcttaataataaatcttctgaattctttatctggaaattcagagatttcttcttggtttggatccattgctgagaagctagtatgatcttttggaggtgttatagaacctattttgtcatattaccagaattacttttctggttccttttcacttgggtagactattacttaaaattgttcttggatttatttttaattgaactgtgttttttaaatttaaaatattttccctctttaacatcaggacagtgtgtattttagcctaatttgattattggtgcttgtaggagtaaagactctgtatgagatccttagttataaagagtcattgtgcactggctttccctgatgctggttgtagtagttactgtcttagtgtgctggcaagttcactgtctcctatggagttggaatggcagggatctcttgcagcttatctggttctctcatggtgtacatttttatttatttatttatttattttttcccagtgttttatttactgacttgatgattcaggcttcaggccaatagagaaggtatccctgagtaggcattggctatggctaaggcaggtgggtaaatgtaatacccaacagtgggctgaggtcccagccttgatgaaggtggctgggagacctctcagttagatgcgctgaggttttatcagggtgaagagtagaagctacctcagctcctctgccaggtcagccagaaagctattcacctcacagcctcactcctatcccagtgttttggctgttcagatcagacagccacctcttttcatctgtaggaatgttgatgttccaagtagggaggaactgtgactctgcctctcacacagcctgaatctagggtgtgctccttctctggggccgcactcaccctggattgttccagacaggctgtctatagatgcctccatactgtgttcctgtgggggaagccccagctgtgtctgcagtgaagtgccagaggaaaacaaggacctcttttctaaggcccttcacaatcacagaggatgcctgcccattgggctagaggtgcagactttccctactgtgccagcactgcaattgtgtttctgctgtgagaaactacccaccagcagaaagatctggaactcaagacctgctcttcagattcttttgtcccacagggtgatcccctgatgtggtgcactcccccttccctagggatggggcttcctgaaagccagactgcagtattgttattgctcttctggttctagccacctggcagggctactaggctctggggtggtgctggggaatgtttgcaaagagtcctgtgatgtgatctgttttcaggtttcccagctgtggataccagcacctgctctggtggaagtggcaggagagtgaagtagactctgtgagagtccttggctgtagatacatttagtatgctggctttctcaaatgctggttatgctagcagtgaagttgtcacgtggacagactcaggacctctggttagtcaggatgttgcaggcagtagaattagctgtcgttttctccttcctgggatcagggctattctgtcatgaattgcagtcatgtcctgagttggttgacctccagccaggaggtggtgctttcaagagagcaccactgtgctattagcagtgggatatacgcttgccctaagttggccaggggaggtattctgactttcaggagacaggcagagccataaaactcccaagggtttatgtcttttgtgttcagctactaggacaggtagagaaaaaccatcaggtgagggcagggttaggcaggtccaagtgcagactctccttgagtggggcttgccataaccactgtgggggatgaggaagtggtcctcaggccaatgaggttatgttccagaggggattatggctacctctgctgtgcagtatagatcaccagagaagtgggggatagccagtagtgaaaggcctcgcccagctcccacacagttggtgaggctggtcttgctcctgcagtaccgtgctaactgcaccaagtttagatccaggcagcctactcagggatctcagacctgccccaggccataagcttccctgctgacaaagcaagcatggctttcaggccacatccctccctgtctgcccacaatgtcagcagctcctgcactcgtatctgcagcaactcccgttagccccctggattctgctcaaggaagtttgtgcccagtcgaaattatcacagaatctagttggaagtttctttcaccctatggcccctccttttatttggctggctgccttctcagaagacccctgtgagatacagtcaggaatggcattccagggcccaagctggagactgggagtaccttcaaggttcctgttgcttcttctacttttgcacttcatgcagctccctaaagtcatttcagctctaggtaaggttacaaccttctctcgtgatctgcattttcagattccccagtggggatgtgtgtttggaggcaggttttcccccctctcactcacactttgggaactcacggcttttcacctgtctcgtgcagtctgcagtggcatgtcacttctttcaaaggatctgtgaattcttctggttttcctgttacgttcctgcggtggttcttgaagcaaaagtccacagtgtgagtctccacacactgttctgtccatccaagtgcgagatgcacgttagccctgcctcctatctcccatcttcctgtttttgcttttttcaattttgatgagtttaaaatgtacttgtaatactttttaccagtttttattagtgtgaggttaaggtcatgcatacttacttccactttacaagtatttatgataaactttgtatatcagggattgacagacttttccttaaaggcccagatagtaaatatttcagtctttgctggctatatgtctctgtcatagtactcaactctgccattgtggtacagaagcagccatagacaatatagaacaaataaacatgcctgtattccaacacaactttatttagggacatggaaatttggattttatataattatcatatgtcgcaaaactttattcttcttttgattttttttttcaccaaacatttaaaaatgtaaaacccattctgagctcatgggctgtacaataacagataggtcactggatttgtcctataggccatggtttgctgatccctgtgctctatgaatcctgctttatcaggtactatggggcaagatagaagtagcatccagggcagctctgtgcttgcagtctaattgaggagctgagatgttgtatacatactttagagcattgggttataaagtagtacaataggcacaacagagttggtagctctgacaagtgagtttgaatgctccatagcagagcaggtcagtggaggctgaaaagtcagggaaagcaggatgaaagaagggcttgcaatcggaagcatgcagataatttggaggtttccatttgaacatgagatcgcaaatgatgaatgcagtctacttactgctattctcggcacccagaatagggcctggcataaaatgtgttctcagtaattatttattgaacaaaaaaatatgttttaaggcacaaacagagtccatcacactaaaatgaagtatttttgatgcactaaaaaagtcaatgaatgtcagggccaaggatttagaatttatcttttatatagtgagagatttttgaccacagggttaatgataaaattatatttggggaggtttaatctgccagcggtttatgggacttcagtttacctaaattgaatctagcttttaaataccaatctcactttctagtactaatttcactttaaaattcttacttgaacttgagccaacaacaagaaaagagagaatttttgtttacatatgcatgctatacaaccactgactcattatcagttggtcttgggtttggcattaactaaaagagtcacaagacacaatatgttctgacatatttatcagtttatttcaagcaacacagcacacagcccaacaaaagttgcaacacatagatgcactgcacagagcatgctaggctgcaagagatgaactgaaagtgggtgcagacaacattaacataggaaagctgtcacctccattccttagccatcttttatagcatgcttatcacatggcttatctggaagtaggtgcaaaatcacagctctccctgtgtagctacaactcaccaatcaagccttcaatgaatgattctggtaatcaaatacaatctcaccacctaacactgcacgtttatcttgacttttatattccagattagtgtcgcatgagataaatccaacatcatatcaccagaagtccctgagtctgggcttagactttaaatcaacagttagccattgacccacaactttatctccccagagattttttttccatctctaaaatccaaatattagcttttgaccctcgaaacaaacgaagagcaattgcataggtggaaaacatagctgttttagcctgagcattgatgcatttcatttccagtaatagaacaaggggtttggaatcacttcgatttctcctgaagcatcttcacagggtggcttcatttcttggtttaaaattcatactgaggtataggagtcacactgcgttctgaagtgacatagaatgctttttttgatcatccaacactttaggtaatccaacactttaggtaatttatgctcttaatctcctctatttgtctagatgttagagttaactataaaaccaatactcaccctccctcatatttctttttgcccttcattccgcttccctggagtgcaccttttctccagctcctttctgacttcccaaattcatgcttaaataggaaaggcacttgactttctagtgtcttctcctggctctttgataaaagccttggggctcccagcacatggttcgaaagtcacaactgaaatgtagtgtcctccagtgttgtccctaccctccttcctctcattgcccttgctctccccaagtgatatataattcactcccgtggttttaattcatatcagtattaatgtcatctgtattctagcttctgtacctgcactccaaactcatacttctacctgcccattgcccttggaccccccactggcacctcaactcaacctgctcaggtcagatcttatcatctctctttaatattcctcatcctctgttctctggctggttagatggttttatcaaccggaaactatattctcagtcttaactttctcaaagcccactacatttgaattctctgacggttcttgcttccacctcacattagctcttaagcctatatgcttttatctttatctgctgtcaccaccacaagccaacatcatctttgcctggattatataacagatcccttgggtgtctaaagatgtattcttaggagtatgtgagttctctaaagataatagtgtatgccactttgattaggtgataatataatataaaacaatatgtacacagattgtaaagcaaccaacgtatagtcaagaatgttataaaatttcaatgtctgaatttgtatttaggaatagttttccacaaagtgaagaacaaagtagtgcttcacagcagttgtattaaagaaaataatggaataattgagtaatttcactgcatatggtagacttggcatgcaaacttgagttaggacctgtacctgaacaatcagcatatactcactttttgggcagtatggccatctatatataaaccacatgtaaattcaccctcagttatagtataaattaatcatttttttctattttcagttttagtaattattggattataatctcatctattagctttatcttcaagtgaacaagaattttaaaattggcattgaagaattatttgaatacagaattttggttaagttctgattattgtgaattggcaaatggagcattgaagatactaattccattttgtccaacatacttatgtgagcaggtattctctgcactaatattgttgaagtaagaatacagaaacagataaaatatagataccaagattcatctttttattattaaatccaacatgcactgttttatttcagcaaagcacatcatcaatcacatcaaagttatgttgttactaagactttttaatattttttgttttaaaatggaattaaagctataagcccaagcacttaaaaccagttactaattacattttaatgaaaatatataaggcaagcctggggatttataagaatttcttgccctttgaaaagggtctgtgtatttttcaaggaactgctttaattgtaaggaaaaacaaattctgttgtatttatgttctttttattgtatgtaattttattcttgcattcaaaatgatttataatttcttttttttctcagaacaaatgtcaaggtctcgtgttcgacatagtcacaagccagatctttgacatcatcatcataagtctcattatcctaaacatgattagcatgatggctgaatcatacaaccaacccaaagccatgaaatccatccttgaccatctcaactgggtctttgtggtcatctttacgttagaatgtctcatcaaaatctttgctttgaggcaatactacttcaccaatggctggaatttatttgactgtgtggtcgtgcttctttccattgttagtaagtaaaatcagcagtcagagggactttaagaaccagaagtaagtttgtaaatcttatcattttttgaagtttgttcaaactatccacaaagcagaaaactgggccaagtgtactttctgaaagaatagacaggggtactaatgccattctctactgggaagttgctaggagatagagagtaatttctgttcccttaactcactacacaactgaaatagagttcaataatcatgcagctaatgtattcaatggaaatagacaaaattaaaatgactcagaagtttttgtggtggtaacctgatttattcagataattgagtcaaagttctacctttcctgtgcaactataagccctatgagcattttttagttttaaggatttactgcccatgttttttcctttgttcaaaatccacatgggtgccagatcacaattattgtgcccctgtggcactgctgtgccccctttcaacccctatacaaggccccatggcccactctagattgggctttcaagagtatatcattcagacaatcaaagctttttttctattctatatcccatgttaacttaaaccacagtgtgaactgtgcttgtctcagattctttgaccccgcttaccaaccagcctcattctctaatcagtatatttttcctaatcacacgcagggttaactaaaaggcttataaaagaatacaaaagaaagaaggttattaccatactccttcttataaaacacacacatacacacatcaactttaaaattaaattcttcatggctaaaccataagtgcttactctgggtttttgaagtctggttttaattaaactgttaacttgacattttataattatgtaaaactgtccaggagcccttctcatagttcaaaacacaatgaagacaaagaaaactgattttccaaatggaagcttttttgcgatctcagaaagaatgcatcaaacagatatattggatcaagatattttggttcctaatgctactgcagcattgcagatgtttcagagaacaacaacaaatatgctacagttcatagtgtgttctggtttctaagccatgatgttaatgtagataaagcttatcaatagattcttccatgagtttacagttaagtagacctttaatttttattagtcaattccaatcacaagtcttggtgaaattgacagcagcaaaaaaaaaaaaaaaaaaaaaaaaaagggctagaaaatggtggtcagatgtctggggaggccctctaagaactcaaagagcccttcctctgatgagaaaagagaagctcattcattccaacagctccttccatgcagtgccaggcatcatgcactttgcggaaatgtttctgacttttgtcctttgaacaactgcttggcaattgcagttatacatgctgtatggcatttgccccagtggatgagaaaatctacatattaagccaaataatactcagcggtaggattaatccatatattaatcctacttactaatgtggacagagttttatatgcctttgccaatatttctgccgtccaacgctttagcctcagtacttttccaagctctttcctaagtttttggagaaatgcaaaatgagtgtgagttgaaatgaatctctctctaggagttaacaatctagttgaggtattacggcttactcgtcttaaagtgccaaaaaaagatagggaaattaattgaacaccaaatcacatggtgcaaagcagaaatgagctcagagaaagaacagattactatgggcttgatcagcccaagaaatattcatagaggaggtagatcttaaatgatgggcctcctccagttgttgctgaattggcacttaagaaactttacatctttccagggttgactttccaattaaagtatgaattaaacttctttggcacaattgggtagtcagtgaagtatataatcaactagttctctttagtcattaggtgacagcagagcattctgctgcccatgaaccctaatagacccctagtgaccttacaggacactcaaggtcattaggggtcatgggcactcaaatactgcccatgacccctaacaaccctagaagactctcaaagcaagaacaaggccatgtctacacaagacaagcatgttccaaccattctataatgtttaggccaaaatgtgaattgtcttaaatccttgtatcacttgcctgcagagcaggcagggcgacattttaggtcaaatattcagctgtttgatcaaacctctgaaatgacatttatggggtttgcagcaacagagaaagtatctccaaattgtgtcccttcagctttttgagtttggatctcagaagtccttggaatgaggatgacaattatgaaagatccatgggcagcttcagcctaaaggtgagcattccaatgctaccatttccctctagccctacagacattgtggctctttcagcagataagctgtcctcacttgtagtagggctgtatttaaattcttctacacacaaatgtagaagaactgtatggcccttggaaactattttccaaattaagacacagataggtattttccctgatagtggtaaaagaaattcttagttttgtacataagctacaaagtattgataaaaagttggcccccataggattctgaggcaggagacaggctggatctgaaaccagtgtgccttctggaaacttatttacttttctccttctcctgaggtacaatgatttctaccttggaaaatcaggagcacattcctttccctccgacgctcttcagaattgtccgcttggctcggattggccgaatcctgaggcttgtccgggctgcacgaggaatcaggactctcctctttgctctgatgatgtcgcttccttctctgttcaacattggtcttctactctttctgattatgtttatctatgccattctgggtatgaactggttttccaaagtgaatccagagtctggaatcgatgacatattcaacttcaagacttttgccagcagcatgctctgtctcttccagataagcacatcagcaggttgggattccctgctcagccccatgctgcgatcaaaagaatcatgtaactcttcctcagaaaactgccacctccctggcatagccacatcctactttgtcagttacattatcatctcctttctcattgttgtcaacatgtacattgctgtgattttagagaacttcaatacagccactgaagaaagtgaggaccctttgggtgaagatgactttgacatattttatgaagtgtgggaaaagtttgacccagaagcaacacaatttatcaaatattctgccctttctgactttgctgatgccttgcctgagcctttgcgtgtcgcaaagccaaataaatatcaatttctagtaatggacttgcccatggtgagtgaagatcgcctccactgcatggatattcttttcgccttcaccgctagggtactcggtggctctgatggcctagatagtatgaaagcaatgatggaagagaagttcatggaagccaatcctctcaagaagttgtatgaacccatagtcaccaccaccaagagaaaggaagaggaaagaggtgctgctattattcaaaaggcctttcgaaagtacatgatgaaggtgaccaagggtgaccaaggtgaccaaaatgacttggaaaacgggcctcattcaccactccagactctttgcaatggagacttgtctagctttggggtggccaagggcaaggtccactgtgactgagccctcacctccacgcctacctcatagcttcacagccttgccttcagcctctgagctccaggggtcagcagcttagtgtatcaacagggagtggattcaccaaattagccattccattttcttttctggctaaaataaatgatatttcaatttcattttaaataatacttacagagatataagataaggctacttgacaaccagtggtactattataataaggaagaagacaccaggaaggactgtaaaaggacataccaattttaggattgaaatagttcaggccgggcgcagtggctcatgcctgtaatcccagcactttgagaggccaaggcaggtggatcacgaggtcaagagatcgagaccatcctggccaacatgatgaaactccgtctctactaaaaatacaaaaattagctgggcatggtggcgtgcgcctgtagtcccagctacttgggaggctgaggcaggagaatcgcttaaacctgggagacggaggttgcagtgagccaagatcgtgccactgcactccagcctggtgacagagtgagactctgtttcaaaaaagaaaagaaaagaaacatggttcaaattatatctaaacaaaaaagaataagaaacaaaaaacacattaaaattttaagttgtattttctatgtttctagatacatcatttttgtttgatattttcctgatgcaagtatgtggtttatcacatgtagctcttttgcatgctaaatgaaaattcaaaacttgccaataaatgaatagcttattgcagacattttttaccaacattaattattttgggtttgtttaaaacctagaggcacaatcttgacttgtcaattactaccctttcacaagctaccatctcagatatatatatatatataaattcaataaagctttctgtttgtgttcc

SEQ ID NO: 674 - DNA, 20 bp, Artificial Sequence
  Synthetic Sequence
tattgaatgttttctctcgc

SEQ ID NO: 675 - DNA, 20 bp, Artificial Sequence
  Synthetic Sequence
tgaggtgaagacagagaaac

SEQ ID NO: 676 - DNA, 20 bp, Artificial Sequence
  Synthetic Sequence
tattgaatgttttctctcgc

SEQ ID NO: 677 - DNA, 20 bp, Artificial Sequence
  Synthetic Sequence
tcactgaggtgaagacagag

SEQ ID NO: 678 - DNA, 20 bp, Artificial Sequence
  Synthetic Sequence
tgaatgttttctctcgccat

SEQ ID NO: 679 - DNA, 20 bp, Artificial Sequence
  Synthetic Sequence
tcactgaggtgaagacagag

SEQ ID NO: 680 - DNA, 20 bp, Artificial Sequence
  Synthetic Sequence
tgaatgttttctctcgccat

SEQ ID NO: 681 - DNA, 20 bp, Artificial Sequence
  Synthetic Sequence
ttcactgaggtgaagacaga

SEQ ID NO: 682 - DNA, 20 bp, Artificial Sequence
  Synthetic Sequence
tgttttctctcgccatttga

SEQ ID NO: 683 - DNA, 20 bp, Artificial Sequence
  Synthetic Sequence
tccttcactgaggtgaagac

SEQ ID NO: 684 - DNA, 20 bp, Artificial Sequence
  Synthetic Sequence
ttttctctcgccatttgaca

SEQ ID NO: 685 - DNA, 20 bp, Artificial Sequence
  Synthetic Sequence
tccttcactgaggtgaagac

SEQ ID NO: 686 - DNA, 20 bp, Artificial Sequence
  Synthetic Sequence
tgttttctctcgccatttga

SEQ ID NO: 687 - DNA, 20 bp, Artificial Sequence
  Synthetic Sequence
tcatccttcactgaggtgaa

SEQ ID NO: 688 - DNA, 20 bp, Artificial Sequence
  Synthetic Sequence
tttctctcgccatttgacaa

SEQ ID NO: 689 - DNA, 20 bp, Artificial Sequence
  Synthetic Sequence
tcatccttcactgaggtgaa

SEQ ID NO: 690 - DNA, 20 bp, Artificial Sequence
  Synthetic Sequence
tctctcgccatttgacaaat

SEQ ID NO: 691 - DNA, 20 bp, Artificial Sequence
  Synthetic Sequence
tcatccttcactgaggtgaa

SEQ ID NO: 692 - DNA, 20 bp, Artificial Sequence
  Synthetic Sequence
tctctcgccatttgacaaat

SEQ ID NO: 693 - DNA, 20 bp, Artificial Sequence
  Synthetic Sequence
tctcatccttcactgaggtg

SEQ ID NO: 694 - DNA, 20 bp, Artificial Sequence
  Synthetic Sequence
tctcgccatttgacaaatga

SEQ ID NO: 695 - DNA, 20 bp, Artificial Sequence
  Synthetic Sequence
tctcatccttcactgaggtg

SEQ ID NO: 696 - DNA, 20 bp, Artificial Sequence
  Synthetic Sequence
tctctcgccatttgacaaat

SEQ ID NO: 697 - DNA, 20 bp, Artificial Sequence
  Synthetic Sequence
tgatctcatccttcactgag

SEQ ID NO: 698 - DNA, 20 bp, Artificial Sequence
  Synthetic Sequence
tctcgccatttgacaaatga

SEQ ID NO: 699 - DNA, 20 bp, Artificial Sequence
  Synthetic Sequence
tgatctcatccttcactgag

SEQ ID NO: 700 - DNA, 20 bp, Artificial Sequence
  Synthetic Sequence
tcgccatttgacaaatgagt

SEQ ID NO: 701 - DNA, 20 bp, Artificial Sequence
  Synthetic Sequence
tgatctcatccttcactgag

SEQ ID NO: 702 - DNA, 20 bp, Artificial Sequence
  Synthetic Sequence
tttgacaaatgagtgtttct

SEQ ID NO: 703 - DNA, 20 bp, Artificial Sequence
  Synthetic Sequence
tccactgatctcatccttca

SEQ ID NO: 704 - DNA, 20 bp, Artificial Sequence
  Synthetic Sequence
tttgacaaatgagtgtttct

SEQ ID NO: 705 - DNA, 20 bp, Artificial Sequence
  Synthetic Sequence
tctccactgatctcatcctt

SEQ ID NO: 706 - DNA, 20 bp, Artificial Sequence
  Synthetic Sequence
tgacaaatgagtgtttctct

SEQ ID NO: 707 - DNA, 20 bp, Artificial Sequence
  Synthetic Sequence
tctccactgatctcatcctt

SEQ ID NO: 708 - DNA, 250 bp, Artificial Sequence
  Synthetic Sequence
tgcactgctgtcctgcatttcagcatcttcaggatgctgtgcagctgaaacatttgataacggtggaactgttcgttattttgcaagcctgtgattccctattgaatgttttctctcgccatttgacaaatgagtgtttctctgtcttcacctcagtgaaggatgagatcagtggagagctggctgcttcttcaggggtttccactccagggtcagcaggtcatgacatcatcacagaacagccacggtc

SEQ ID NO: 709 - DNA, 90 bp, Artificial Sequence
  Synthetic Sequence
acctcaaacagacaccatggtgcatctgactcctgaggagaagcttgccgttactgccctgtggggcaaggtgaacgtggatgaagttgg

SEQ ID NO: 710 - RNA, 15 nt, Artificial Sequence
  Synthetic Polynucleotide
aaaaaaaaaaaaaag

SEQ ID NO: 711 - RNA, 10 nt, Artificial Sequence
  Synthetic Polynucleotide
aaaaaaaaag

SEQ ID NO: 712 - skipped

SEQ ID NO: 713 - RNA, 15 nt, Artificial Sequence
  Synthetic Polynucleotide
aaaaaaaaaaaaagg

SEQ ID NO: 714 - RNA, 15 nt, Artificial Sequence
  Synthetic Polynucleotide
aaaaaaaaaaaaggg

SEQ ID NO: 715 - RNA, 10 nt, Artificial Sequence
  Synthetic Polynucleotide
aaaaaaaagg

SEQ ID NO: 716 - RNA, 10 nt, Artificial Sequence
  Synthetic Polynucleotide
aaaaaaaggg

SEQ ID NO: 717 - skipped

SEQ ID NO: 718 - DNA, 367 bp, Artificial Sequence
  Synthetic Polynucleotide
agtgtggatgttttagagaatgacttaagaagtttgcagcttggacccgtatcccactcattatcaagaagcaactcaagatgactttccctggggcatgtcagttgcctcatagcctgctggtcctgtaagcaagcactaagctccacagtgccagttccttgccccaacctggccccatccaagtacagaagaccttcctttcctcctttttccatattgctttctgttctaagtgggtgaataattttataattgaaaaaataaagataaagtctgtaaatccagccgggtacggtggctcacgcctgtaatcctagcactttgggaggctgagatgctcggccaataaatttctattgtttat

SEQ ID NO: 719 - DNA, 127 bp, Artificial Sequence
  Synthetic Polynucleotide
tgacttttgggagagctgaccttttgtgacttttgggagagctgccaaaagtgaaacttagtgcctcagacaagcaggggcaagtctgctaaggaagctgtggccagaagcacagatcagaaacacg

SEQ ID NO: 720 - DNA, 220 bp, Artificial Sequence
  Synthetic Polynucleotide
ggtgacacgtctcagccttagccctgtgccccctgaaacagctgccaccatcactcgcaagagaatcccctccatctttgggaggggttgatgccagacatcaccaggttgtagaagttgacaggcagtgccatgggggcaacagccaaaataggggggtaatgatgtaggggccaagcagtgcccagctgggggtcaataaagttacccttgtacttgc

SEQ ID NO: 721 - DNA, 98 bp, Artificial Sequence
  Synthetic Polynucleotide
ctcctggttcaaaagcagctaaaccaaaagaagcctccagacagccctgagatcacctaaaaagctgctaccaagacagccacgaagatcctaccaaa

SEQ ID NO: 722 - DNA, 1071 bp, Artificial Sequence
  Synthetic Polynucleotide
gtggtgaattgatgcaaattgcttcttagtgcttattaggagctgaagaaatggaaaagcagtctccaatttcacatcttgaaatagaggttttttcccacatgttactaaagaaaagtcagcaaagagatttaaatcttatatttatcttaaaagtccctgatttatgataactatacattgtatgtaaattcagggatatgtatatgtatgtttgtgtgtgtgtgtgtttgtgtgtgtatacctgacatatatagtagatatatatacctattgaaattctctcactctgtgtatgtatatatacctatggaaaactagttgttgggaaaggagtacgtgattccctccctttcacttttcaaagtgagccactaaacagaaagtctaagagttcagaaatgtcccattctcctaaggactttcccttcaccatttttctagggtatagtgccactgacttacatagctagatgtttttccacaagaggatttaagggaggaatgtttataggacacacacacaaaagctctttctatttataatatcaaactgcatattcacctttatagcaacagaaaacagacattaaattaagccaaattttaaatcatttgactttgacaagcagaaattacttttaaaaaatgtatttatggctgggcgtggtggctcacacctgtaatcccagcactttgggaggccgaggcaggtggatcacttgaggtcaggagttcaagaccagcctggccaacatggagaaaccccatctctactaaaaatacaaaaattagccaagtgcagtggcatgtgcttgtaatcccagctactctggaggctgaggcaggagaattgcttgaacccaggaggcagagattgcggtgagccaagatggcaccactgcactccagcctaggtgacagagtgagactccgtctcaaaaaaaaaaaaaaaacttttttaaaatgttaaaattaatttaaatgtaaaatttctgaatactaatcttagaaatgtgtaaaagatattattttgattgttaaacaaataaaatcctgttttcaaaatgc

SEQ ID NO: 723 - DNA, 187 bp, Artificial Sequence
  Synthetic Polynucleotide
ctcctcgtttggcgccaaaccctgtggtcaacggcgcgcgggtctccaggctccgtgttctaggcccgagttagaatcctgtcagctgaggaggtcgggcggggcagaggggcttcaccttgaaaatctcggggagactgtgggtacgagggggaagtgattatttttctgttgcccacttttcaat

SEQ ID NO: 724 - DNA, 141 bp, Artificial Sequence
  Synthetic Polynucleotide
agaaccataaagaaaagatgaaaaaaaaaactatcaaagaaagatgaaataataaaactattatataaagggtgacttacattttggaaacaacatattacgtataaattttgaagaattggaataaaattgattcatttt

SEQ ID NO: 725 - DNA, 28 bp, Artificial Sequence
  Synthetic Polynucleotide
gagcacagactcccttttctttggcaag

SEQ ID NO: 726 - DNA, 403 bp, Artificial Sequence
  Synthetic Polynucleotide
tattattaattaaaagttacagctgtcataagatcataattttatgaacagaaagaactcaggacatattaaaaaataaactgaactaaaacaacttttgccccctgactgatagcatttcagaatgtgtcttttgaagggctatgataccagttattaaatagtgttttattttaaaaacaaaataattccaagaagtttttatagttattcagggacactatattacaaatattactttgttattaacacaaaaagtgataagagttaacatttggctatactgatgtttgtgttactcaaaaaaactactggatgcaaactgttatgtaaatctgagatttcactgacaactttaagatatcaacctaaacatttttattaaatgttcaaatgaaagcaa

SEQ ID NO: 727 - DNA, 590 bp, Artificial Sequence
  Synthetic Polynucleotide
ggcccggacgggacgtgcgcgctcaaaggttgcccgtctctgacgcccgcatttcctggtctggagccggctgagccacagcagggtcgccgcggggtcccggggccgtgctcccctgcccctcccgggagcgcgcggggcggggcggggcggggcgggaccaggcgggcgagctgggccctcgcccctccctcgggcggtcacctgggcacgggcgctgcaggtgtcggggcctcaaccttgcggagccgacagccatcgatcctcgggtggcctcgaggtggtggcagggccgccccctgcagtccggagacgaacgcacggaccgggcctccggaggcaggttcggctggaaggaaccgctctcgcttcgtcctacacttgcgcaaatgtctccgagcttactcacatagcatattggtatatcaaaatgaaatgcaaggaaccaaaaataacataattgaaggcagtaaaagtgaaattaaataggaagatcatcagtcaaggaagacccactggagaggacagaaaatgaagcagtgttttatcatgtgtatttcagcaggtcttcttgaaatttaactaaaaat

SEQ ID NO: 728 - DNA, 117 bp, Artificial Sequence
  Synthetic Polynucleotide
gctggagattggatcacagccgaaggagtaaaggtgctgcaatgatgttagctgtggccactgtggatttttcgcaagaacattaataaactaaaaacttcatgtgtctggttgttt

SEQ ID NO: 729 - DNA, 142 bp, Artificial Sequence
  Synthetic Polynucleotide
aggcatcggcgcggtcagcctcgtggcgcgcccacgcccccacgccggctcttcccggggtccttccgtgcgcgttgatatgattggccggcgaatcgtggttctcttttcctccttggctgtctgaagatagatcgccatc

SEQ ID NO: 730 - DNA, 20 bp, Artificial Sequence
  Synthetic Polynucleotide
tttgacaaatgagtgtttct

SEQ ID NO: 731 - DNA, 20 bp, Artificial Sequence
  Synthetic Polynucleotide
tctccactgatctcatcctt

SEQ ID NO: 732 - DNA, 20 bp, Artificial Sequence
  Synthetic Polynucleotide
tcgccatttgacaaatgagt

SEQ ID NO: 733 - DNA, 20 bp, Artificial Sequence
  Synthetic Polynucleotide
tgatctcatccttcactgag

SEQ ID NO: 734 - DNA, 27 bp, Artificial Sequence
  Synthetic Polynucleotide
agtgaccactgccaacagcttcatgtc

SEQ ID NO: 735 - DNA, 26 bp, Artificial Sequence
  Synthetic Polynucleotide
gggtaacagctgaatcaggcccttcg

SEQ ID NO: 736 - RNA, 150 nt, Artificial Sequence
  Synthetic Polynucleotide
aaaaaaaaaaaaaaaaaaaaaaaaaaaaaaaaaaaaaaaaaaaaaaaaaaaaaaaaaaaaaaaaaaaaaaaaaaaaaaaaaaaaaaaaaaaaaaaaaaaaaaaaaaaaaaaaaaaaaaaaaaaaaaaaaaaaaaaaaaaaaaaaaaaaaa

SEQ ID NO: 737 - RNA, 150 nt, Artificial Sequence
  Synthetic Polynucleotide
aaaaaaaaaaaaaaaaaaaaaaaaaaaaaaaaaaaaaaagaaaaaaaaaaaaaaaaaaaaaaaaaaaaaaaaaaaaaaagaaaaaaaaaaaaaaaaaaaaaaaaaaaaaaaaaaaaaaagaaaaaaaaaaaaaaaaaaaaaaaaaaaaaa

SEQ ID NO: 738 - RNA, 150 nt, Artificial Sequence
  Synthetic Polynucleotide
aaaaaaaaaaaaaaaaaaagaaaaaaaaaaaaaaaaaaagaaaaaaaaaaaaaaaaaaagaaaaaaaaaaaaaaaaaaagaaaaaaaaaaaaaaaaaaagaaaaaaaaaaaaaaaaaaagaaaaaaaaaaaaaaaaaaagaaaaaaaaaa

SEQ ID NO: 739 - RNA, 150 nt, Artificial Sequence
  Synthetic Polynucleotide
aaaaaaaaagaaaaaaaaagaaaaaaaaagaaaaaaaaagaaaaaaaaagaaaaaaaaagaaaaaaaaagaaaaaaaaagaaaaaaaaagaaaaaaaaagaaaaaaaaagaaaaaaaaagaaaaaaaaagaaaaaaaaagaaaaaaaaag

SEQ ID NO: 740 - DNA, 135313 bp, Homo sapiens
agtccccagtctttgcttaggcccctacgtacacaaactgaacctagtgacccagcatggcctctaatttctcaacacttctgtacttctgtaatgattaacccatgcttctcacagatccatgccccaaatttctgtgaataggccctgactggcccagctaagatcatgtgactgcacatgaccagtccactttggcattaacaagcctactgcagactcttcccttggtgttggagtcactcctagaaaagagcaaatctttgtgagccaggcagtcaacctgctggcagcttccactcagccttggagttttttctatgtgtaactttcataaactgagccttatttatttattttttgcactatcatctcatgaaatattattgcgtaagctgaggaaacatgttattcatgatgactggagtttcaagttttaattgtacaatgatttagttttgagtttggtagaaataaaatcaaatttaaaaatcagatatttttcatcttacattatgatgtcccaaaactgcctttatgcttgtgacatagattcataatgtcttctcattccacctgtaatcactgtttgaaataaacatatgtctaatgatatatttggggacattctattttcttcagcttgttgcaagtgaattgatggtgatcttttggtattggtttcattatcaaatttatctccactccaaaattacagtaatttcaaagtaatttagtctatatatttttccatagcttttcttccaaatagaaactgtaaaaagttataaattacttctctccactactgaatttttgtttgcagaataactgatgtaagtagcagaatgcctcttcctagttcaaccctcaggaatagaagtgagaagatctttaaaacttcaccattttccttgacttgtttataattctgaatgtaaatgtgaattgatatggtctatcgcttaacaccacaactcttaatctatgtgcagggtcgtagctcaaaactactgccaggaccacatcaatttcatattcaccctgatcaatgtgtattaatggtgataactatgagaatgaaatgtacagttatcagtatcatttttgactcactaggtatatcctcagaaatatatgaaaaaactaaacacagcttttagtttgacataatttttaaacaactggagttaccttgggagaaaaatcctaccaaatatctataatattgaaagagtaaaaaagagttaaatgtccttaacatcattaatcattagggacatgcaaatcaaaaccacagtgaaataccatctcacaccctttaggatggtggtgataagaagaaaaacagagcataacaagtgttggccaggatgtggaaaagctggaaccattgtgcactgctgattggaaagtacaatggtgcagctgctaagggaaatagtatggtagttcttcaaaaaataaacagttataccatttgattcagcagtttcactcctaggtatataccccaaagaattgaaagcagaatctcaaatatttgtacacctatgttcatagcagcattactcacaatagccaaaaggtggaaacaacccgaatgaccctggatggacgaatggataaacaaaatgaggtctatactgacaataggatattaattgaccttaaaaaggaaagaaattctggccgggcacggtggctcacacctgtaataccagcactttgggaggccaaggcaggcagatcacctgaggttgggagtttgagaccagcctgaccaacatggagaaacctcatatctacttaaaatacaaaaaaaaaaattagccaagcatggtggcgcctgcctgtaatcccaggtactcagtaggctgaggcaggagaatcgcttgaacaggaagcagaggttgcaatgagctgagattgcaccatcacactccagcctgggcaacaagagtgaaactgcatctcaaaaaaaaaaaaaacaaaaaaaacaaaaaaagaaattctgacacatctgctatggtctaaattatgtgttcctctaaaattcataaattgaaatcctaacccccaaggtgatggtattaggaggtgaggctttgtggaggtgattaggtcatgagggtacaaccctcgtgaatgggactagtgccctcataaaaagaagcccaagagagaccccttttcccttccactggatgaggtcacaccaagaagttaccatctacatgtcaggaaataggccctcaccagacaccaaatctattggcaccttgatcttggacttcccagcctgcaaagctgtgagaaataagttcctgttgtttataaaccacccagtttatggtattttgttatagcagctcaaacagattaagatggcttgctacaacatagatgaactttaaagattatgcttttctatgattccacttagatggggtaccaagagtagtcaagttcattgagacagaaaatagagtggttggcaggggctagggggagggaactctggggagttagtgtttaatggatacagagtttcagttttgcaaaatgaaaaagttctgaagatggatggtgctgatggctgcacaatatgaatgtatcaacactactcaactgtacacttaaaataaggttcaaatgatacattttatttcatgtgtgtgtcaatctcaacaaacagatttgttcaggcaaggaaactggttagatgcgaataatactattagagcatcatcaattgaatattaacaaagtgctcatagtttaactttctagctcaaggaagaatggaccattttgaaactatgacagaacattacttatatagctgatgtctttgggaattggaaggaggcatattccttcaccagctgtggctccccttcagcaacctcatatactctccaagcttctctttcctgggtcacctgtttaatcactcccgggacttaatcttccacctatatgttgaccactcacaaatctatgtctccatctcacaagcttattcttgactccagacccaagtattcaactgcctgctgaatacgtgtggtcagatgtcatagaacttcagcttcagtatatcaaatgcaaacccctgttccccccaactgcctcctactccccactggccttcctctggcattccctcctcagttatgagcaccaccgtctcactagccagccagtcaagccccaaactccatctagctgacttctgcctcttcctcaccaccctcttccagtaactcatcaggcactgctgtgtctcattccttcctatccctccagtccctccccttctctccatcatggctgtcactgcatggttcaggctctctggctccccccaaaccacccccacattgctgccgaggtgaactgactactcttggcagccactggattaaaatctttcatcatcttcagcatgataaaacccatatcctttagcatgtaacaaggtcttaatgattctgccagagcttgcttgggggtagcctgcacttgtgggccactccagtcacttcacaggtgctcagtaaatctcagttgaatcagtcatcatcatcatcatcatcatcatcatcatcatcatcatcaatttttcagtctggttcctgtctccttttccagcatcctccattcatagcctcatagccttcactccagccatgtttcacttgtggttttcctgggcaagataagctattcctccctgtctttgcagagtttaaatgactcacttgttcaagtacccaccgttgccatgtgggaccgtgagcaaagtacttaatctcactaagcttcacgttcctcatctgtaaaacagcaaatatggacctcacaaaattgtagtgaggctaaaatgaaataacatatgcaaaagcagtttataaataataaacttactataaaatattattttgtaattctgcaagcttgtcttaaatgccatcacctccaaggagcctttttgccatcataagcagaaactatctctctcttcttggaagctccaccatgcacagcctatgggccctcatcacactccttgagttattcgagttcaagtcccgtgtttacaaccagaccgcaaactctatgaagtcagcatccattcctctctgtggttctccctccgccccatccaggtctcaagggtctagagtctttcaaagagaacacattctgagatttgaggaggcagagacaaaaagttccactgcgaagtgccagggaggcttctgtttggggtgtcccttgggatcacagatcccccacctggtgatgagtcaacccagcaccaccccattgcagggctggaatgacagtaatgggcccacctgctgcctctcctcatacccgcaccccagtcagacattgcaagtcagtcacggctctgtcctgctgggcctggagtgttccagtgccttttccatcacagcaccaagcagccactactagtcgatcaatttcagcacaagagataaacatcattaccctctgctaagctcagagataacccaactagctgaccataatgacttcagtcattacggagcaagataaaagactaaaagagggagggatcacttcagatctgccgagtgagtcgattggacttaaagggccagtcaaaccctgactgccggctcatggcaggctcttgccgaggacaaatgcccagcctatatttatgcaaagagattttgttccaaacttaaggtcaaagatacctaaagacatccccctcaggaacccctctcatggaggagagtgcctgagggtcttggtttcccattgcatcccccacctcaatttccctggtgcccagccacttgtgtctttagggttctctttctctccataaaagggagccaacacagtgtcggcctcctctccccaactaagggcttatgtgtaattaaaagggattatgctttgaaggggaaaagtagcctttaatcaccaggagaaggacacagcgtccggagccagaggcgctcttaacggcgtttatgtcctttgctgtctgaggggcctcagctctgaccaatctggtcttcgtgtggtcattagcatgggcttcgtgagacagatacagcttttgctctggaagaactggaccctgcggaaaaggcaaaaggtaacagttactgtctgtggtttaaaaatgaggtgtggagcaaataaacaggttggaagtgtggggtggggtggtggggtagggtggtggggcagggtggggggttgtgagcagtcagtgggcttgtcgccgattagcactgaagcagtgtttagctggacggcctttctgtgggcccctctgacagtgcccttcccaggaagatgtgtttctctgtcctcagccacatgaaaatcttttgcctaccgtgcctgtcaatccattgcctgcccgcccctcccccaccccccgttttacacctgcctgtccagtctaccgctctctagggcatccacgctgagcagtgggaagaactttaagccctgaagagcaggccaaaggcaagcaagaaccccctcgaacagcttcccagcttagtgaggccttatttcattgattctctgaggcacattgttttttcacatgttagcatttctgaaattgggatgcagctcacgatcaagtcacagtttaactggacacattatttttctttcttagtggtgcagaaaagtaacagtgtgtcttacaattgactgcgtcctagattctgtgagatgcaatacgttattaaccatcacgcacatttcctgaactctttcaatgagcagacaccagcctgggttagactggagccctaaaagcacgacacagattccaccctggactggcttctgttctgcctgggaaaacccaaagtacgtttggagaccaagagcaacataaagtagcataggtggaatagtccatgagaagtgcgagcaaaaggtgccggagatcagagaacaccaagactgtacttgtaaatgacaactggctttgtgcaattttttctgggaaaggataaggagtgactatagaactgtaaagaaagaatgcactttgctacagccttgcagagttgtgcaaatgccgatgactaaaggagctgaaagaggaaggaggggataagggatgggggctgggtaggggtgagattaggaccctgggagctgcaagccactggagagatcaggaggaaagggagggagacctgctttaggcgagaagagaacagtatttgttccaaatctcggttcagaataagttcatgtaggtgatggggccaactggaacaggtgaaggcctatgaatgagtgtctcagttagggtctccttagagtttaatatgaaaaggtgttagctaagtacagagctggtacctgagagagtaaaaggaaactctaaggtatcatggaggtagcaattgcaggacacagctcccacccctagggctgagagaaccaagggaagagacaggaattattaagacttggagcatagatgagaggtctgtggagctgacattaggacttgggaggaaggcgtgcatggaggctgctgctggatctctgaacctgacctcgggtctggacccctgaggagaaagccctggcaggttggtgcatgtggggccgagggacaatagcttaacaaccagcataaaagagagcagcatgggacacgcttcaaccatgcgcatggatggctccaaaacctgtgtgtggctggcccaggacgcagggaggctgcagggggaagagacaagttaaacctgacttgtctgggaagcaccattgtcctcaggtcactttcctctgtcaagcctggtgctgaagttatctgttgtctccaggggccaagtattaagagtaatcagaaactcagtcctttcttctaggagcttcccttcttgcatgaaaatcctgataaaactggaaaaaaaaacctcatgattaaattttttcatgtattcattctttccttctatcaaaaaataatctccaggcaccgtgctaggttcattggtatacaatggcaacaagacctcccagcccctgcctatgtgaggcatctgtggactgcggaggaaaatccaatatgccattgttctctctttcccataagaaattacaattctcagttcattttattctcactgtgctctttgtgaccctcaaagggggtcacatgataacaggactgtagctgctggcctaaaatgagcccattcctgtggcgctcatgtcgctgtgacagagaataaccctgttttcagaatgctctggtgccctccctctcaatctggcctttcgctggcatgggtgggcgactcctgctcagggactctgccttctccacagtgtgctcccagggagatggagccactcgggctgagggccttggccagggcacctcccagggctgggcctggtctgggctggcgttcactggatgccatcctgatggcctggaaattgagatttctgtctggcacgcctcccgatggctccccacctgctaccacattccaggagcttccaggatgtctgggtaagacagaggcacccccaacagattcagtagctctgagagggatctgtggctccttcctaagcttgcggttcttctggaaacttctgcctctagaagatggtccctctaagaaaagtacaaccacccagcccataattcagctcccaggttttccctcaaacctccatgtctcctgtaagcagagcaagagtaaaatcagataccaaatttcctcattcctcagctcccaatccctaagggcataagatgaaaatcttcagatctctgctttcctccctctttttttcttcctctgttaacatttgtcaagtgttactaagtgtctggcactgtactaagtgcatcacctccctgaactctccgaacagttccacgagagaggcctctctgtgatccccccggtactgatgaggtcactgaggctccagagaaggattagtaactggtggggttggacctgggattcacacccatgctgcgtgacccaggacaggcaggcatggccgttacaccacactgacccccgtggatcgagatctatccaatagtctggtcactgatatcactaagatagagtggccatataatttatcatccaatcagggcagttttgcaagtgaaagggagcactattaataattgcactgggacaataaatgtaaaccaacactggacctggaaaactgggacgtgtgtttgccctataccaaggtaagctagacacagccactgccttcatggagttcagaaccaggcaggggcggctcccacgtataattactgtgcagcacaacgtggagaccgtggagtagaaggaaacacggatgggaggtgaggaggaggtctgtgagctcagaggaggcaccggggctggagagggtgagagaagacttcccaaggagttcatcctgataacgtgcattcccaatgacgagcgctctctccactgcacaagacaagtatacatctgcccgtgttggctgtggacctggcgctgtgtcagggagggtttatgaagatcactaggtgggtctcttggtgtcatcccttcatcccagcttctgggttaggatggatatctgtgggggggcctgaggactcatgaaagtggggcgctaatcatgttttggacaccacaccctggagcacctgggacagctgtggcctttgtcctgggttcagcatcaagccgaggatgtggcaagtaaagagaggctgggcaccaactccagtgtacccaggctccgggtcatgtttgtccaggctaagaattctgtcctggttctcagtgcagaaggaagaatcatggggctcattttaggccttggctgccttctgttaaattgaaaacagagcaggaaggaagaaaatttaacaggctcagttctaaaacaacaagcacaactgtgcccttgccagaaacccctcctccccatgttgattgaatggtaaagagaggaggggaggtgagagggagagagagagagaggaagagagagagaaaggaaagaaaggaaagaagaagaaagaaagaaaaggaaagaaagaaagaaagaaagaaagaaagaaagaaagaaagaaagaaagaaagaaagagaaagaaagaaaggagggagggagggaaggggaaaagaaaagaaaagaaaaagaaaaaaagaaggaaataccagtttgggaaaaaagaattttccaccagcccttctgagccttggctgggcttaattaaagttacagacatgtgtaaagggcagggtagggggagtctgagctgctgagaaaacatgtttttaattatactgtggaatttctccctggggtatgcctgtacgcagttaagcgtcaaggacagggatgccgctctggggaggggaagctgagcatgattttggaagccggcagaagaggctattgtgaaaaccagacctgtcaggctaggaaaagaatggctggtggtctttgaccagggagtgacgcgtgaaatgcagcaaccgcccccgccccccgccaaaaacaaacacactctcacagagttagaacaacagtgacctctcaacaaatatttttcaaagattaccaaccaaccattacctagagcagcggttctcaaccttggctgcacggtggaactacctgagacgtgttaaaaagaagaaccctgatgtcccatgccccaagattctgatgtagttgatctggggtatgatctgagaccccggcatgttttcagcctgcagccacatgagaagtgctgacctaatcaacaggggtgatgatttgaggggcggggactataggcaaaaaaaaacagcctaattcaaggatgagaagagggcacaggtgaggtgggaacagtcctagggccagacaaagaaggaagggagaaaggaggtgctgatccctcccctactcctgagaggaggcctttaagtcaccgtgccttgtggagaccagattcttcaaaaatacaagaatgagtgagtgagggagtgggtggatgccaggagagtgcgtgacaagccttgcaagggaggatgacaatgcactagcttggtttggaaattttacccctggaacaggcaggccaagctggctggtcccctccctgatacacagccctccctctttatatatggagcaggggacggtgtgtggctggtttcttagcaagcaccatggttccaagttggcaactggggagttctgaatccaaaaaggagggagatgaacgtaagtggagggcaggcctacaaggttgcagataagcttaattctgtctccttactcttctgcctttgcaacaaccctgtgatcttgcgacaaccctgtaaggcaataacaaatggctcatgtttattgagtgttacctcatgccatattgtgctttcgtgtttaacacaattgtctcatttcaccctcacgactgctctgggaggtaggtcctggtatcacatccatttcacagatgagaccatttggcacggaagagttgagtgggctgcccaaggtcacatagctaagatggaacaggctggataggaaccccagtaacttgacctcagagtaaccttctcttaaccctgagtgtacactgtaggaaaaatgagcagtcccatttcagagaggacaaaactgagactcagaggttaagcaagccccaaagtggttgttaacccagatcttcccactaactcccaaatcagcatcagtgtttaacgtaccagacctctcccagatagatgttgccgcatggaagacagccgatctacgtgatagaaagccaatattgcaagcagtcgtctaaaggagtcaaatgtgttggatttgaactggatgtctcatttctttggtgaagacactggaaacaacttccaggtttcatcaattgctcctatcactcaacgttgctatcttactgaacttgttccccagccttacccactgatggaatgatccagaatggaagacaagacaccaatgtacatgaccctgggggaggctgtttcttaaatctacagactgttggtgacctgagccccatgtcaccaaaggctttcctggagaagcctcctagaccagtcttgacaaaggctcactcattccgtggatatttattgggcacctattatgagttctgccccatgtggggtgctggaatcacagtagtgacaacgacagatgaggttcctgtcctcaggaagcttactgcccttgagggcttcacttacttggaggagtgatgaacctgaagtgcggtgtgtgttaagaagcggaagtccagggccaggcgcggtggctcacgcctgtaatcccagcactttgggaggctgaggcaggcggatcaccaggtcaggagatcgagaccatcctggctaacatggtgaaaccccgtctctactaaaaatacaaaaaaattagccgggcatggtggtgggcacctgcagtcccagctactcaggaggctgaggcaggagagtggcgtgaacctgggaggcagagcttgcagtgagccaagatcgtgccactgcactccagcctgggcaacagagtgagactccgtctcaaaaagaaaaaaaaaagtgcctcacggagagtctattcttttcttcccatattgtgtgtgtgtgtgcgcgcttcctccaacacatcctccctatatatattttgagtaaaacatcttgtaaaaagttacagctacataatcaccacctgtccctaaatagtttttgctttttctttcttcaatgcacgatcattttcccccatcaatttattttttagtttcttataatcttgttgccagtaggctgttttttaaaaagcagaacatggtttgttcttactagcaggaaaggagcatttattgagcctctgctatggtgtcttttattttgctgagagcctatttacatttctttgagaggaaaacaacaaagggttacatgaaagaccatgtgaatagcccctagctgatctattaaacttgctattccccggccagctgcttcagatctccttcagatcttatgtgtttccttcctaaggtccctggagtaagggttgcatagacctattctactctccaactcacatgtccctctccctcttcctctccataattccacatctccaacccccacccctatgtgcaatgccacagggtgtggactgccacagccactggatctgcttttggaatcaagagtccttaagctccaaatggaaccgaaatttaaataccaactttcaaccatatgttaacatcagcagcctcttccaatgtaaaaacccatggcagtgtgccctgctttgtttctttaagcaatagaaacttgaaggaagcatgttggtaggccagatttttgttggctttgcaatggatcacagtcatttattcactcattcattcactgattcattaaatgaccacatttgcaagggcaaggtaatggggagggccagaaaggacactggccccagaaacaggaggctggattttggttctgatgctgccactgctgatgtgacactgcacaggtcacctgcctcctctgagcctctttccttaactgcagagtgagtggctacagagaaatctttactacctgttagatcagcattacctgggagcttgttagaaatgcaagctctggtggggccatactgaacccaaatctgcattcatgtgcatagtgacagctaaaatgcactgaagcagatgatcttgatgatcctttatgaaagtctcatgctaatgcagttttctaaaatagaggcagagtggaacccagatggacacaaaatctggttgatataataaaacaaggtagagggtgtatggtggggagggggtaaaggaaggaaactgtttaggtaaagataccacaaccaaagtcctactgcacacatgggatctgaggagggctgtgtctgctctggttacgttttctataatctcttagcaccactgaactttctctctttttgttttgtttttccagattcgctttgtggtggaactcgtgtggcctttatctttatttctggtcttgatctggttaaggaatgccaacccgctctacagccatcatgaatgtaagcatagcagggtagcttgggcaagccctgaagagactttggtctgggccttttgtctagaaagatcttggggtgggagtgtggggatcagatctgcttatcatcatttcatgtctatgatgcatgtaacagatttatcaatgttacacaaattataatttttaaaaagtctttagagacagggtctcactctgttgccgaggctggagtacagtgttaggaccatggcacactgcagcttctatctcttgggctcaagtgatcctcctgcctgggcttccaaagtgctggaattataggcatgagccactgctcccagctaatttttttgttttttgtggagacagagtcactacattgcccgggctggtcttgaactcctggcctcaagtgatcctcccacctcagcgttctaaagcactgggattacaagcatgagccaccttgtccagcccaaattttcatgttttaatcctacacattctaagcaaatacttgtgtgtagttactaagggactgtgcacttatttttgtttgctttgttgttgctagtttttatttttttatacctaaactctctcgttttaaagagaacagatttgtagatgagttctcgaaaatatttcaggaatcaatatagagaatatgttatacatggtgccagagaaaaatgaggacaagagatgctatacaatcgtactgaagaaaaattttatttcttggacccctgaggtgtctgcagacctgaaaggaacctagtgagagcctcttttacactctgcccctgtgggaaagccttcacctggtttccggccctctatgtggtgaatgtggaagcctcaagcgttatgcaaatctgcccagtcctctattcttgatcttcaccttctcgttcatgagtttcaggccccagttctgaatcagcctcctgtccatcagactcttctttacctctccccgaggagcccataacctgcagccctactgcatgcttggggtaggtgctcagttcaccgtggttgaaggaatagacgagcgtctgctcaagcagcagcagcaactgcgtggagtcttcttgaactaacactcctatgcccctctcggcacaaaatgacgtgtccccccttgcttccccttcacatttccacccatgcctattacaacatccgtctgtctccccactacaccgggagcttgagagaagaggccatgtctctagcacccagcacagggactggcacacatgagatgctcctgcttcttaaatgctgagaatgaaggaggacatcagaggggcccgggccccttcccaaaaaggccaactcctaggtctgcatcctgcttggtctccatgactaatcccgtcttgtcctcattttctgttttaaaggccatttccccaacaaggcgatgccctcagcaggaatgctgccgtggctccaggggatcttctgcaatgtgaacaatccctgttttcaaagccccaccccaggagaatctcctggaattgtgtcaaactataacaactccatgtaagtgttgagatccctaccatgcaggggaggaagttgcacaccccttcacgtgctgaaatgcacacgtgcgtgcacggagcatggagcactgagtgttcttgtggctttgctgagcccctaacctcttaggagcagagcaggtttcctctctggaacattctgttaactgtcagggcacttggggagaaatctccaagctaaggccacgtgcacaaaatttcttggtccttatatccccagaatgtgacctggagtctgatggcagcccgctgcagagatgtgtccactgccttctggtcattgacctgcttgggtggagtgaatcattgtaggagaaaaactcagttccctcaccctgatcaacctggacagatctctcttcctttaaaagctttcttggacatctaagggctaggaaaaatgtcagggagcattgggaaggtaaatgaagtcaggtttacaaagtcaagtttacttcttgggagaaaaatacaatttccaaatcctctgttataattgccatcggccccctggagtggtgagatctcggaatatggctcgggtgcagtggctcttcactgtgggcctgcaggctattctgaaaagctgatgaaaaccaatgacccctcttccaagaaaaatggccacataccaaacattacactgtacatctgatttcagggaattgtagatgccaggttagtagcctcaggtctagggtcaaaattcaagtcgaatcccacaggaagagggtctgccttcggaattccctttcagagcattgggagaacatcatgggagcatattctagagacagaggcttagggtgtggacagggccatccctcacccactgtgctgaccttaagcagcaccttgtgcagcccatacctgaaggccaccagcaaaggcctgttggggagcaggctttacccgacctgtataaacaccaggctaggtgaaaactgagatacctggttactttagttttttccttgggggagctcagtatgattcttccaggagaagcctgcttttagactaaaaagaaaaaaagtttgataggtcaacctaatgattggaggtggccttccccactgtgaacaaactatggctgcatgtgccctacaatggcagagttgagtagttgtgatagagactgtatgatctgtaagcctgtaatttttatgtttgctgacccctggattaccagatgatagaagaggaaacatctgtcttcctagcaaagtcaaggaagtggcatttagcaggactcatattgctgcaagcactgccttgcagttttagtttacaactgcactttcagcttaagaaacacctgcccatccagagagatcgtgtggggtcacatggtgggatcagggaggcctgaagacagctcagtggaggctgcatggagctttggtgggaacggccctggcagtgtctatagatgttattgcggaaaactgaggggtgggagttggagaagggggctccagactctagctgtacttggcatttgaacccggaaagttgggtttcatgttttgcactcacattatgagtgaaatattggcttattcaaggttcttttgcttgcaaggcacggaaacccattcaagcaatcttaaaccccagaaggaaatctatgatttggatactagacattctcacagagccaagggcagcaaggcggggctcaggagaggcaggccaagacctggagagctgtcaggagctgcttcctcaactctcttccatctgggcctgccagccctggcctctgtatctactccattcacctctctccatggaccagtctcccctgctcctcaatgcctgggctgccattgttcatgcaattcacaatacctcggcctgggcaatcagaagctcatctctgaacaccatccaaattcctgggaacaaatcgggttgacccagctttattctccctgtcccatcagccttggcagaggcgtgcatgtgcatgcgtgccaatgtgtgtgtgcagggaggtccttgtggatgaagcatggctgtcagagcctacctgcgtgaatgggtggaagggcaggtctcagagaattgggtaaaaactggataaaccctccagtgatatccaccaatgtcaccctgtttaaggcttctctgggcaagagacacacagagcatgggaccgagaggcgagcagaccctgccaaaactgggagactgaatagatcgctcaccatccttgtcagttagcctatatgtacaaggaagtaaaattatctctttctcctgccttggcagtattgtaaggatactcaatgtagtagctaggccagacacatagtatctttaaatatagcatgagatggccaagcacggtggctcatgcctgtaatcccagcactttgggaggctgaggcgggtggatcacgaggtcaggagatcgagaccatcctggctaacacgatgaagccccgtctctactaaaaatataaaaaattagctgggtgtggtggcgggcgcctgtagtcccagctactcgggaggctgaggcaggagaatagcgtgaacccggggggcagagcttgcagtgagccgagatcacgccactgcactccagcctgggtgacagagcgagataaaaaaaaaaaatagcatgagatattattactgttataaaaataacagctatttccttattaatgaggctttgtccttacagcttggcaagggtatatcgagattttcaagaactcctcatgaatgcaccagagagccagcaccttggccgtatttggacagagctacacatcttgtcccaattcatggacaccctccggactcacccggagagaattgcaggtaagcatgactgcagtgctctcaagcatcatttccctcacctatggagagactgaagatataggaaagaacagggagagttggtgaaaaatatactagcggaggcaggaagggatggggtctggaggcggcttgaacatcaccttggtgaagatgcctcttcctccacagaagcctggaaggtaggaagttgggaaggaaggcaggaaaggtctcatccacgttaagtctagagacagaaagaatgctaagagagatggcactatgggaagtatgaggctaggtcaagggctagaagcaggggagacgagtttacagagtttcgtaaagatatagagcaactctcacagagttctagagcgagagctaaccaggaacatgaagcagcaaggccaactatcattaaggagccagggaggtcagagatcatgtattatcatgacataaatatgcataattgtactatttctcccagtaatatttagcacccaggccccgaggcagagcaagtggagagtgggtgatgcagggctgggggtgtgtatggaggcaccacagaaggtcaacaggcagcgggctgaaggcagggactggactacatgcatcaagtccaggctgcacgaggaaggatgagaaggcagatgagcacggaaatggactgggggaaatgaagaggcaagggaatagaagtctcagtgggtgccatgaccctgtttaagtgattgagaaaatgaacaagatgaaaaggttaatggctgtggtcagaaagtgaaatatgtgaattcaggatttcgaaggtagggtgggtgatgactggcccccagatgcggccatggtgaagtggggcaaaggtgcaggtgcatggtgaggggaaggaggaaatgggaggtgatgatgttggccccacacggacaccacggttgtgcaggaagatggcaggagctgggcaccagggtgggagccacctggagtcaggaagagtgaagagaaaggatgaagaggctccctctcctgtgtctctcctccccaggagaagaacaagaaacaatccgaaagtaataacaccaatgtgcctttacaaagtgtgagtgggtgttgtgtgctgtcacgtgtgtagtaggctcctctgtggatggctagagggactggacatggccactggatcccacttgcaagagcagaggaaaagagtggtcgtgaggaagtaaagccccccaaaatccaggggttgctgcagctttgggtgtggagcgtgccctctgaggaaaggctgctctgggggagattgcccaggaaacggggctcagaggccacgaaagcagctgttaggggcttctgggagatgtgtgctcctaggattagggagttgactctaaggatgaccttagaggttaacagggatgagaaaggggtcaccaaggggtctaccaggggaatgggagaggctgtattgatagaacagcttctgctgcaggttccaaacaagaaatgtgggagaatggttgaaatcagccccgggggcaccttcccgtgcatgcgtgcagctccttcaacattcagtcgaccttcagtgcctcctgtgagccaggcactgggctagtctctgggggtggagagatgagtcaggcaaatgccagccctcagagggctcacagggcagaaggtgagagatgagtgagcagaaaatgaccacagcgcgtgtggggcccagtggagggaaggaggggattcaggagcacaggagagtcaacaggggaaacttctccgaggagaatctgatcctcctcccatctggccaccttctgaagccctctctccccatccaagtgagaaaggacaggcgtatgaccagattggtgtatgaagatgctgaattacgttctcattgtttcaaactagtaaaccatagattttatgtagtaacttctacaaactgcattacaaacactccattctttgttgccctgggtagaagtttattttagtgagcccaagtttgaggaaccttatatggtatgagtacaattaccattttaatagtaagaaatcccccttcccctgtgtaccaaccagaaggtgtttttttcctaatttaaacaaacagatgcagacgtgggctgtccagctcctggcgggatgacatacctcatgcatccagtgggtttgatgatgaggcagacatttcacttaagtgcctgatcatcagattgagtcctgctgggaggaagtgtgaaggaagtaatttcaaaccacagtttctctgtggcttttacaatgtggatatgagaaccaaaatcactacttcttaaccccagagcaggactgattttgaattggtatgcaggcggttccttctgcaggcttcgggctgtgagaagtccctaacagagcaaatctggggacaagggctcaggaaaggttggccacggccccctaggaatgggggctctgcaagatccctggccttagaggctgtgagagggaacaggggtccatccccaagtaagggacacggtctttgaggaaatcccaggccagggcctgaagggcactgtcaggaacacaggctgtttcagtctgttgagattcaccggggcgctgctcactgtgagcacggactcctcaggccaatgtggcagaagagcccacctttgaaagcgagcgggtgggggtggcggggctggtgctggtgcgtgcttctgcacagccacctgggaaggtatgccgctggttgacccaggcagaggttttctttcatggcaaacctgcagtactgcattctcagcagggaggattaatggtaaaagaccaggcatggagcccccttccctctccctcgaagcaagctctgtggtctctcaatcatctttaaaacaccttcttcccgggagcctcctacattctcctggcttccctcccacccccaccctcagctcctggggcctcagcagccccacccccaagcctctaatcttcccagggaagggaacaagaagaaccacattttaaacgaaatttatttttctttcctcaggctcccagttcacatttctccctcaggagtctagggaagcttctgtctggtatcggcctcctcttcacctgggcccccgccctcctcaggtgtaccagaagccagcacactcccccttcccccccagagccacagcagccctgtctcctgggtggtcttgtgtgccaagcctgggcaacatcactcccagcttttcttgttttgccccttctccccagcaagatatttgtatgtaaggtcaggtgagtgagttaaagaataacgaagagataaacagtcaaatggagtcctgactgtcaggtcaagacaacagttatttactgaatgcctcatgtcattcaacagacatttattgagactctgattggatgtcagtctttaatgctgggtgtcagagagaggtgacttcaagggcttgcatctgtgcacccagcattgctaggtacaatgaggagtataataaaagcaggagccatagcccccaactctcaagagatctcccatgtgtgtatgtctgcatatgcgtgcgtgtgcatgtgtgcgcatgtgtgcatgtgtgtgtgcatgtgtgtgcatgcgtgtgtgtgtgcgtgtgttggggatggtgttggtggagtgagagtgtacaaggctgtgtatgaaggggtaattgggaaaagaacaatggagctggcacccagggacaggaggaaaagcaggagggctgggtttggaagacagccggatttatgtttttgaagagggaagactagaatataagggagcagcccttctcagagccctcctcctcccttcgggccctgtgtccagctttccccaaagtccttggatctttcctatgcaaaggggagtgacagtgggcaccactctcagggaacccattactgtgagagaagccactgtgccactgtgtggtcgaacttcaagaccggcttcccctgccccagctgcatggacaggcctgtggggttggcgcaagacccttccagaggaaactagctgcaacataaatccggatatggtgctgttcagggaaaggcacaacctggggatgagaagggtggctgtccagcacacaggggcaggcctcttggccactgggggaggggagaatttggagaggaagaggatgggatgccgtggaattgggaccaggaaagaatggggacatgtgatggttaaagctagttagagaagaactgggagataaacagtcacccatgcccctgaagcactcggggtgaagagattggcattttcacgcaccccagtgctttccctttgtgttgaagtcccttcgtagacatccaggcccataaggctcttctctggccagagcctcatgaactatagcactagcagggttgaggccaagcattggccctggaagccagccgaggaggagggtgcttgtgtgaatctcccaggaggggtaagaattatattaattcgatcataataagcatttattgagtgctgttttgaggcctgggagctaagcacttcacattccttaccccgcatcaacaatcctatgaggtagatgtggaaaatgcagacacggggacaggctcaatcacttgccccaaggtcaccttaactgttaggtgttctttatgcctccttataaagaaaccctgcttcccacaggtgttgagaggagctggagggagcttgactagggctcatcaggcaagccccggcatgtgcctggctctcctctttctacctggagcttttcctgcccttaatggccccaactcatttctcttagtccatgtcagtgccctgagcatctcagcccaagctgagatgatagaaacacccagaggggtcctctaccctgtgacagctgcggtgtgggaagagcacgtgtctcctccaatcctagaccagagtttctcagcctcagcatcactgacacttggggctagataatcctttgtgtgggggagggaggagtgtcttgggccttgcaggatgtttagcagcatctctggcctctacccaccagcacctccccagttgtgacacccagaaatgtctttagatcttgccaaatatttccaggaggatgaaattcccctgtttcagttccccagccccacctcaatgagaagcactgtcctagaccaaccccacaaagcatctgacacccccatccagccctggctaactttttccaccttcttactaaattgggcccagctgcttcagcagtcaatgtgttgggggcagcccactggcaagagcctcacctctaggggctcccagagaccccaagaacagaaccttcctctgagagttgagttacaagtgtttccaatcgactctggctgttttcctttttttgacccatttccccttcaacaccctgttctttctcttattcatatgtaggaagaggaatacgaataagggatatcttgaaagatgaagaaacactgacactatttctcattaaaaacatcggcctgtctgactcagtggtctaccttctgatcaactctcaagtccgtccagagcaggtagggggatgtcactggccagtggtccctggaggggagggaagcacccagcctgagaaaggcaagaaatatattggcttttttcttctttcttccttgtgttcacattcagaatccatcacttaatgccttgtatttagaaaaaaaccgggggatcacttgagatcgtgatcattttcaacataggattcgaagctgtacacatcctggtgaccttaaaacatctcaggtttttataactggaaggaaccttagagatcatggggcacaaccttctctttatagatgaggaaacagaaatctattcatttattactcaaatatttagggacagttgtaggtactagaacacagtgtgaaccagacaggcaaaaccccaggccagggagcttccattccagtggggccacaggcgatgctcaggtaagcagagactccgctgtgtgacttctggctgtgatgggtgctgcaaggaaaatccggtagagtcgagggttagagagggacggaggggcaggtttaagggggatgctcaggaaggccttcctgaggaggtggtatttgagcagagttgtctgtcagccacacagtaagtgagaggggagttccgggcttggaagctgccagcacagtgctggcaagtgctggggtggcgtcccgaggctacagaacctgagatgctgcagaagagcccacttctgctttcctggaccacttccttctcagcaccaggcaaactccttcttctatcccctggcacatttctgacctgtgtatacgcccccaatttatctaacccctttaaataatctcctctatttatgcagagcattcttaccactaactcacgacttgcacatcccttagctcccttactcctcacaacaatcctgagatgggtcagagaaggaggcttgcgcgtctggtgatggggtgatttgtgcacagttacagggctagaaattgtcagagccagatggaatccaggtcctctcaatcctaatccagtgtttcttacttcagtcctgtggctctcaaagcccagagaccagcagcatcagcgatgcctgggagcttgttaggaatgcaaattatcagggcccactccaggtgaactgggtccaaagccctgggataaggcctagcaatctgtgcttcacaagccctccaggtgattccgcaggctcaggtgtgagagctgcagctgtcctctgggccttctgggctccccgcccagcttcttcagtgtgatgaacacagcgagaatgctagatctgcagcagctgatatcccagacaccctcccgactccctcctggctgggtctgatcctcctccagactccaggagagaacgagacataaacagaacttcagagcctgtgttaaccctgagatcaaggtctgcacagggtgctgtctgagtccagaggagtgagggaccccaccccacctggtcagcaccagctcctggaagcaggttctcacactggttccctgcacaatgaaggagctcatacctgcttttctggcttctcagaccctgaggttttcaccgaaactagacaaggggaacctagggtcagcctggaggcagggtgagcttggcgcctgcagtgcccaggccctgggtggtgcggctccggccaggccctgtttagcttcctctcccacccccacagagggggtgctgtcggcaccgattgctcattttcccctttgctttctcttcagctcgtaaaactcaagtcctgacaatgccttgatgacttccagttggtaataaaagggagatgaagataaggacaggaatttcggggaaatttctttccagttccttactaatgtgacatttagatctctagtactgtgcttctggcatcagtgccaaggcctttcatgttggagaatggaggccggggtcaccaggttgtgcctttatttcatgttgctggctctgatgagctgatgctctgctgattagcaaacgctgagccatctgcgcttcgcagaggcacgttccagccaacccggccctccctgcccacttcccaggatgctttgccttgtgggctcacctgtcttctagctcctgatctgtatctccacctccatccagttccggggctccttatcagcactgttcccagaactgtccatcacgatggcaacgttctctctgggcgctgtccaacatgggagctcgcctctgtgttgtcactcatgctcattgaacatggatttgtgtcctttaccatcaggactggatacccctcctggtcctttctgcctggggtcttagcacagctcagaaggaacctcaccattccctctctccatctagggaattagaagatgacaggggcacagttctctggctcacccccagcccagtaaactcctggacatgcttcaaggcccagctcagatgttgcctcctcagtgaaataatttataaacccacccttctttgtcctgccttctccctcttccctactcactggagagttaacaggtgatggttaagctctgggttcaaatctcacaaggccacacacttagctatgtgacttcaggcaagttaattaaccactctgtgcctctcgtttcctcatttgtaaaatggaaatagtaaaagtgcctaccagcatggcagttgaagttaaaagaaataatatatgtgaacacttggaagggcgcctgacacatagtaaactctcagtaaatactagctgcttttagtggctattcttaacacaccctcttcagtgctctggtttcactatgttttatgggtccctgagatcgaaagtgtccacaccgactcatggtcagctgtaacctgtgcctcgtgtggggaccaggctgccatgtgtagtctggacagtgtaggaggtggcagagctcaggcctgttctgccctccagcccagagagccacgtcgttagatgtcatgggagactgtggtgccccgggaatctcacgaatttgcccacggtactcagtgtctgtccaatgctatgggagtccaggactctaggagccagttaaggtgctgggtggccacaggtccctggccaaggtccaggcctctcccctgccacctgatcctcgagaggccatcacgagggttgtacttcaagaaccactatccttgagctacctaggagctgcagaatgtgcactctgcagggcttagggcctgcagacaagatagatgcagggtgtctagttaaattcgaacttcagataaacaacaaataattttttcaaataattgtgttctattcggtccctatttgggacatatttgtactaaaaagtattcatttatctgaaattcagattcgactgggcatctggtgcttttgtttgctaaatccaagagcaaatttgttctagctacttctcaaccccaccttcagagaggaagccttgatggtactgtaacatcatgctgtaagaaggggatcccttgaattgtaaatggcactctgataagatgaggtatggggattgtattggtttcctgttgctgctgtcataaattaccacaaacttagtggcttcaaacaacacagatgcattatcttacagttctggaggtcacaagtctgaaagttagggcatcagcaggactgcattccttactgcggagttctagagaaaaatccattttcctgcctccttcagcctccagagacacgccacattctttggctagtggtctgcttccatctccaaggccagtgggggcttatcaagtctttctcacatcacatgactctgtttcttctgcctccctcttctacatttaagggacccttgtgattacacaggggcccacctagaaaagccaaaataatctccttattttaaaatcagctaatcagtggctttaatcccatctgcgatcttaattcctgtcgccatgtaacacaaggtattcccaggttctgtgggttaggacgtgggtgtctttcctaccacagggcagtttctagtgttgcctcttctccctgcagttcgctcatggagtcccggacctggcgctgaaggacatcgcctgcagcgaggccctcctggagcgcttcatcatcttcagccagagacgcggggcaaagacggtgcgctatgccctgtgctccctctcccagggcaccctacagtggatagaagacactctgtatgccaacgtggacttcttcaagctcttccgtgtggtaagggaggggtttggctgctcgccaattgcaaggtgattcctggggtagcagagcctcacgaattgaccttggggagggcgtgagcctggtgttctggacaatccttgcaaaagctccaggctcccagggctcaaaaaatcacaactgatagtatttctagaacagtggcccagggacccagaagtcactatgaggttcaccattaggtatgtggctgtggcatgtttgtgtccactctaaatgtggggataatcccctttacctcctctaacagagtggtaaaggaaggaggaggcctggtttgactccctgacctgctatttcctagccaggtgatcatggtaagatattgaaccttttctggtcccagtactcatctataaaacaaatataatactttacagagtggtaggaattatacaagaaaagtatacgcaaaacatttcataaattttaataaatgatggccccatgcttcttcctctggaaatggtctcaacctcaatggttggtgtttctagagagaaaaaacgacagagaaagtttcatagtctcaaaaatttggaaagccctgatctagctcaaccctttgttctagaactgcatcccagacagactgcttgggacctgaaaatatctcctcctttgctagaaggataagatgagaaggaattagataaaggaggtgtagagcagaggttttcacactgcaaagtgcataaaaaccatcagagggccgggcgcagtggctcacgcctgtaatcccagcactttgggaggccgaggcgggcggatcatgaggtcaggagatagagaccatcctggctaacacggtgaaaccccgtctctactaaaaaacacacacacacaaaaattagccaggtgtggtggcgggcgcctgtaatcccagctactgaggaggctgaggccggagaatggcgtgaacccgggaggcggagcttgcagtgagccgagattgcgccactgcactccagcctgggtgacagagcaagactccgtctcaataaaaacaaacaaacaaacaaaccaaaaaaacccatcagagaagttggtaaaagatgcaagtgctaaatccccacccccaatcactgtgattcagaagaaccaggccaggcccagaatctatcctgttaccttaggcgattctgatgaagaccattgtaggccacactttcagaaacactcaaaattagaatccttcagagaaggtggcatatataatatttctagcatggaattatgttttttttcttttgcctacattttaatttctagaactgtgttgtagggaatgtcagtcactaagaacttgattgaggaactgtgttttgtctgtttcatgactgctctctcaagtcccaggaaactcactttcagcttgtcttaaaaagcaagctgaaggcttttaaaaatgaagcaacatgaaataagacaccgcagtttctggcacggtccacgcttaatccccttcaatgtgtgactttccgtggaaagttactctacgattttcccagctcgtcagggtggggccccagagtgagtatgaagggtcagagcctagggatgccaccatcagtgagagcccaggaccccagaaaaggtctcttggctcaccacactgtaggaaaaataaaaagcaatgtagtccaaatgtctctatccaaagtttcaaaaagaacttgattttagacacgctccttgacttgttttcagaatcagacagaagagtgaggcaacaaaggtcccttattccaggcagctgaataccagcacagccaggagtccagtgctggtgtttgcagagccaccagaggctccctctcaggtgtccagggcccgcatgctttgtagaatgggcagaatgagcaatgtctgtgcacctgggctttgcaggcagggcctgggtacccaggttcgtgcaatcctctcgtcaccatgaagggagcagcatcattcttcccttcttgaagcaccttggccaccagtataggtaaatttacctcccaggacatgaccattgattctgggatgtcaatgccagagatagtagggtaaatcggcacctgggtaaaactttccattggagactagaaccaaaactcaggacactggcttccaaatgtttctttatcagacaagaaagaccaagtctttccttacgtcttcacatgctgccttggcaaatgctagcattcacaaaccctgggctaccttgacctgtcacccttgcagacctcagacgggtcctgggggcttgctttctcggtttctgtatgcaggcactcaaacctgcatcaggcacctgtgaagggccgggcactgtgctgaggccaaggctccaaatgtgaaccttccaccctcactgaactcacagccagaccagagacaagcaaacaggacatttcacagcagtgcagcctagaaagggccaacaccagcagcatttgtccccccgagcggtagcttttagaagcttccccagtgattcaatgtgtcctacaaatgcctggcccccactcccagagattctgagtcagctggcctagggtgcagccttgacttcactgtgttaaaaagcttcccagataagtccaatgtccggccaagattgagaatcactgacctagagtttaatttaccacctcagtctctatagaccacgcataataatagtaccccacacacctctgagggtccaaagaactttcatttgatcacccatgagaccaccgtggtgtggagatgctttctctctcctgttctcttaacaaagctggtgagcgacagagcctgcagtggaccgggagatggcccagaggagaaagctctgccgtagtcggcctcagttaaccacggagcaccacccctacctgctctcctctcactcctgcttccgtctcggtggagaaagatccaaccgaagcaggacacatctagtcttctggtgcctttaaaatgtacttttccatttgacaaatggattacactaaaaacaaaaatttacaaaaaaaaaaaaaaaacctgaaagaaattgcaggcattaaaatgggactttgcctttattgctcctgggcccatcctatttgggtttttagaaaaacaagcctgaggcaggcccagaaaggctcagggcagaccctccgatcctctgaaaggagcatcaggcaggcaggggttgctccggggccagggaaggggccccgctgggacgcggctgttattgcagctggttggcgcgcagccatgcttagctgcagtgcgggaatgctgggccttctgttctgggctgtttctcatacgcacgtaggccagtgtataaataaggttttattaaatgccaaatgagttctcattaacaaagaaagagggaaaatctcagtaaaccaccgtgacggcatctacccactttgagtcaggagctgggggtgtgagtgcaacctccgagacaagggaacctgtggagcccagagaatcggaggggggcgctggggttagcaccgactgagaccagctgtgttttctctcggttccttggagatcagaagtgagtgttgtcatcttcaaacaatccaaaggcagtacccatggccttactacatccctcccacaccatcccacccatccccgcgcgtacactcacacgctcatttgcacactatcgcacacgctcacttgcgtgcgcacacacagattggtgacctaggtggactgggagagaaataagagccaaatgactggattttctccaaggaaatttattaatagcccctcttggtttcacctgaaggagcttgtcttcacctgcggcctttgcaggcttaacgcccccagcttgaaacccagaagctcagacttgggcccaaggtattattagtgccaacactacctgaaatgtttcgcacctcataaaaatggtgtgtcagtttcgggtgagaggttgggacgcttcccatctgatttggcccaaggcatgcatgcccctccttctccttcccctcctcctccccctcttccccctaccatccttcctgttttctctccaactctggtgcacagctttgaaatcttgctgagaagcaaatctgtcccttctgctttgaatgtttatttgtggaagttcggcaggggaaccgaggcgggtgccaagacctgccatgctgctgggaagtctgagtctccctcccttccccctcctaaatgcttgttgatagagaaaagtcagcctcctcggcatttgggctcacggttttcctttgaaaatgcttccagtgtggcatgattcagctttcttttctgtcccccaaccactgctctgttgtcatttttacttttctgattgcattttatccgtgtctctttgactacggggtggctggacgttgagttccaggaagaaaagggcccaatcttggggttctgactacatgcgcccatcaatgtcctgtttcattcttggctctggctccctgaattcctgagtcactggggagaagcgtgggtggaccgccccctacccagtgagagttgccacagttgctgctctcctgggtcattggttgcagattgttaaacttcacctatgcatttcaactttcgggtggatattgctacgtcaagtgtctgggaaagcccccacagctacaggattttacagtgaggtcccactaatgacttgatgtcatgacttcctcattctttccaatttctcccacttctccataagggttttgggaaggggagaagagaaaggagtgattcctgagtgccagtaccagggaacagcagggctgttgggaggaaacaaaactaaatcaggaaggtttttgttgttgtttttggggggttttatgaaaatattcaagccacagcaaatatatttgatttatagcattagtattttttctgcctgcatctacaaaaatctttacctattaccatcaaaatatcctctgggtgaatggatttcaacaaagaagaaataaaaatgaaatagaagagaggccccttcgtgcacattgagcctactggctggattgtcacttgcctgccttgatgtcttttcagctccaggcaggcagtaggccagggcttattttcatgacagatcagatgttcttttatggatttacaaagaaagaaatactgagaagtcaaaactgaagtcacttaagacaagagcaggcccctgggaaggctgccattgaggataatgagtcctggggtcctggcctttgttcagtaaatacgcactaggcgcctacaatgtgtgcaccaatgtgtgaggcgtcaggttctctccagggtcagttggttttaagaaaggttttggcttctgatatgttttatctctacagaacagtagctcttaacctttcttatgggttaggattaccttcgagaatctgactacagctctagacctgttccctaaagaaaactaagttcacagggacacacaggatggggctcatggagcagctgaagccagaccccaggttaatagcctttacattaaaatgtttttctacctaccactaatatgcattctttagtaagcggtctcaatatacaccgattcttccttaactctgtttatgaagtattcagcatcctccctgcccccttcagcatcctccctgcccctgagcacaggatccaatggcgtgaggaccacaggcctgggcagctgctggggcatacaggcatctcttagtggctgagagactgggccctggctctatgttggctcctaacttgctgccatttaaaggaaatcttagcctcccatccgtaaaatcgagaaaataagacttgtcctacacagctcatgaaatagtaatgaaattcacattagagaagagatggaaaaacactttgaacaaaaagcattttgctcttataaaagcacagcctcttttgagaggccctttgctccccatttctccttcttcagacccccccagactaggagaaggtctgtctcatggagtgaccttttggctgcctctagattccaagctcagttttgctttcattaaccacagatactgggacggacagaaaaagacctagtttctgttgagccaaagagtctcataacttgtctgttcacatacccaagagcccaccctctagttgagacactcagttccctctcattctgggagactgcatgtctctgtgacctcctggtagagaccgtttgacatgtcccccaaccccccagtgattgagtctgaattctccactgatgacgcatttcctagcactcagggtgtcccctcctggttgccccctcaccactgaagcccgcttcctcccttttcatttgatgcttaacaactgtcagtttgcaagaaacatgcttcaaatccacattctcccagttgcctagcaacaacttccctcccggataaatgtgggtttcctgtagctcagcccaggactgaacacagcagcacacacttctgtccactgcttcaactgcttttcacctctggtctgcatgccttcaagactgcagctcatccctcccttcagaaccttccatagcctgcagaggccatgtctgccccaaaaagacacattgaacctgaggctacttatttacccttgtgttaggtatatcctcaacttagaaattaatactgtttccagattgtcttctttgaatcacagaaagtaaaacaacaaaacattcaatgcttaagacatttcatgtgcggttgggtgacatctgtttgatgaacacatttgatccaaagcatcagaaatactatgccaacaagactttttaggaggtgataaacatgtctgttctaccttaagaaaaaaatattacacagtcccaagggagagacatggttttgatcccagacaacccaagcagagacctcttagggccggaatcatcttggctgctgcctaggaccttatatcaatttcttaagcacaggatcaaggcctaaaggccccttagactgacctcagttagtagaggcagatcccttcacagccttatcttccttagaggtctagtctgaccttgaacttcggctggcagtgctgtcagttgtgatgtgtgacatggaagagttatttgttacttggaaaattaagagaacttatttggcataggaaattgtgtgtgtgtgtgtgtgtgtgtgtgtgtgtgtgtgtgtgtgtgtgtgagatgatgtttgccattttgatctgtgacttttttttccagaaatagtttctcagttccattccaactaaacttacagtctcttccggttctttgacagaaacaattcatgtgaatttgaacagataatagggaagggggaaccaaaagaagaggagagccctgggaaagttattttataatttatggcaacctcagtcaggcaactgtgaacaggtacatatggagggctccctcgggactaggcagtattcagagatgtaaggtgtgaggaccggaccctcatcatttaccattcccactaaaaagagctgggaaggaaattgtagctgtagcaccaggcacgtaactggagcttagtaactatttggtgaaggaatattattaaattattaacaagatggaaaaaagggtattaaccacacaaaaatacatctcaagctattgtttctctgttccctttcccccaaattcctagtcttgctcttatctggctgtctctctagtcactctttcttgctgactctcttcacgttcctttctccacctggaattcctgggccctccccttttactgacagacactgtcctcactctcacagtcatcagtttgtctctttacaaacctcagctcaagtgtcacttccccgtccccaggtgaaactgactgctccctccctgtaagtcaccatgatgactgctatatatagccctcatggaacctaaaacctcaacagacacagtctctttcctactctgttatagtttatttactcattaattaccacaacacgtattattgagcacctactgtgtaccatgcccagaagataaaagacaaacaaaataaaacctattcctatgcttaatgagtttacagtctagtggagagatagatacattaaaaaataacagcaaaccaaaataaaagtggtaaataaatgcactgagaaagacaggaatagctaggaggggcacctaatccctagggaaggaaagctggaagagcatggtgatgggggaagaaggctttctggagaaggtgaggtagtttgaaatgagttgactctggccagtaggggtagagtgagaatggggtgagacagggtgggttggtcattttgatccattagtcctcaaagtgataggactagtggctaaggactgcaggctttacagaagcctacaaaactatttgagatttgaagtttttttttttttttaattggctccaaaagaaaatgaaaaaactttagaattataatgaatgaatattaaatgaatatttaaggaaggtaattttattcaacttcattgttaaatttagttaaaacaagcccttgagtttcattcaacactgttttatcataccgttgatgagagaaaacaaaactgattcctggccagggccactgtcagcgtggggtttgcacatctttcccatgtctgcttgggttagctccaggtactcctgtttcccccacatccccaagatgtgcccattagtggaaacggtgtgtctgcatgattccaacgtgagtgagtgtgggtgtgggagtgagtgcccctgccatgggagggcatcctgtccaggttagattcctaccttgtgccctgagctgctgggatggaatccagccacccatgactctgaactgaaataattgggtgaataattatcttactttttaattaatctttgaaaatgtatgtatagttcacatgtatttcaatatttaatattagaagtattttagtctttattttgaagtttggtgatttattgtaaccagaaacaagctatagaaacttaattttgggccaagtgcagtggctcacacctataatcccagcattttgggaggccgaggcagacgcatcacttgaggtccggagttcaagatcagcctggccaacatggtaaaaccctgtctctactaaaaaatacaaaaattagccagatgtggtgggcacctgtagtcccagctacttgggtggctgaagcaggagaatcacttgaacccgggaggcggagcagtgagcagagatcgtgccactgcactcccacctaggcgacagtgtgacactccatctcaaaaaaaaaaaaaaatagaaaagaaagaaacttaattctggtttatatcaattagcctgtggtaaaattggtttcattatagccatttcacttagttgaagtttccaataacctgtggatgaattaagtgaggatttactatattcataaaatcttaaattccaaagcctgtttgcagttcaggtttttccactttacaaacacttctaagtattcacaatgattgcttaaaattcataccagataaatcattaaataagttgttcaaagtcaaataatttcataagtaaaaattaggagcttttagaaaactatacctacatagacctagacctatagatagacagagatctgaatagatatggacacagatgctttccaaagtgttcatgtgatgtgtggtggagtttcaagaccagagtgtgcctggggcctgcagaagtaaaggagaggggatggagagaagattgtccacatggccatgggcaatctcccacccacactcaagtgaggaagacaggaaacaaattcagaaagaagagaaaataatcaaaactgatgggagcttgtgactgatttacttatgcgcagcctccctggagacatgagtgtggctgttccttaggttgtgcctctgggctcctaccccctcttagatgccttcctattatctaggacctggttgctttttgtctgcatagcttctttggattccagtctttgatgccagcttcctcctaaagtagcctttcagatgtcccttggttaccctctgctatctaagggctcatcctaccccacactcattcccagcaccaatttctggatctccaggctggagatttagacaatgggatgggaagaacccatgatgggtcccagacagaaagtggtgccagccacagaaagggcacacaggcacagaagttggtttggggtaagacgatgtggtcagttcagaacacgctggatctaggcagatgcccagcagacagttggatatgtaagtctgaagctctggggagaggtctaggttggaggtacagatttagaagtcatcaacaaaaaggtagcagattaaatgataaaggaaatgagactatccggggagtgtgcagagtgagaggagcaagggaggcccttgggaacctcagcacttcaggggaaggtagaggtacagttgctggtgggaaaggcagagaagtagcaaagcaaaccaggcaaaagcagtgtcacagacgaccagggaggaaaaggacatgatcaaaatgttgagaaaagcagagaggtttgaaaatacaagaagcaaaaatgtccactagacttaaaaaccaggagaaaactggggggttcttgataaagcatcttagtaggatggtgagggtagaagccagggaagtgttggtgaggaagtgaagtcactgattacggactatgcttaaaagaatgtgggaatgaagggtggaagagagaaattagactgtagctagggagacataagcgatcagaggtagattctttctctcctgtgggagaatcttgcacgtatacacagcatgacgacagtgatggaagggctggcgaagcctcagggagactcttggaggtaaaccccatgaagggaggactttgtttcattcactgccgtgtccccagcacctggcacaatagcagacactcaatacatatttgtcaaatgtgggattttatcatttagaaactgcacctggctgtgagtaacaaaagtcagagaaaccgtgggtttcatttttctccccaggcagagtctggagctgggtcctccaagaggggtttggagcaccacaggtttcctcaagacccccaggctgccctgtgtttccctccttcatccccagcatatgcctgtcatctggtgacctccaaacacctgtgctgcctcctccagcacatccatgttgcaggcagggaccaggcaaagggcagaggggcctacttcaaaagaccatttccagaaaccccatcctatgacttctcctggtgtcttggttaccattgtgccataggctcaccctgtatgcatgggaggctgggccaggcattatgacttttagcaatattgcatagataagcatcaatctttgtcactgtgacgaagcctagtcactcagtgctaggcaaggttaatggaatgggttggtgtgtgcattattcttgaggtctttcttatgcttcatgttatacatttattaggacgtttaggcaacagggggataaaaatgaagaggagatgcatgctatgatctgaatgtttgcatcctccccaaaattcatatgttgaaatcttcatccccaagatgatggcattaggaggtggggcctttcggaggcaattaggtcatgactgggattagtgcccttgtaaaaccccagaaagccagcttgccgcttccaccatatgaagacacagagagaagatgccatctacgaatcaggaaatgagcccgcaccatgcaataaacctgctggagccttgatcttagacttcccagctgccagatctgtgggaaatagatttctgttgtttacccagcttatggtattttgttgtagcagccagagtgaactaagacagtgctgatctcgtattcttggagggaacccttagtctttagggaaagcaaagccaccatttggggcagggtgttctccaagtgctgccacatatgctgatgtggttaaactgcaaactatggtaaaaatgtggaggtctgtggaattgtcaatcaggaaaaagatataaaaagaagttaaagtcttcgtgcttctggaaggatatgtgccaaattgttaacattgattatccttgggtagagatgtggggaagtttgcagagacagttttgccttgtactttatataagtaaacagctactacttcgttgtcttaaaaaaaaaaaacagcctatgtgctcttcatgtgactcagaactacctaggcaatacgattaattgaattagtaaaattgagtgattatgaattttcaggaagtcattaatttaccacttctttattacatccacttctaacaggacttcaatataggggaatttgacttcaagataaaaagaccaaatttatttacccttttaaaaaaagacaacttaaaagcagacttgtcttacagaaccttccttagttggacatcgatgagtgtacagaaaatgcaatggataaaaagcttggtgatacaaagataaaaagtggggtcctgtccttaatgaacataccatttcatggagtatcaggtgtataaacaattataatcaatctgcttgttattctgataagatcatttactcacacatcaaatactgagtgcccaccacatgcccagcatacctagaagtcatccagtatgatttctgtctacatggagcatagagtcttacaggggagatagatgacaagtaaacaccagaataattaccaatggtgaagagcacaaggaaggaaacagaactcctaaagagagcgtggctgggcaggggtgagcaagaggcatagaaaaaggggcatctaaatctacttgggaggaagctgtttctcacataggtcatcatgttaggaatgagacttgagggatgagtagaagtttgccaggcaaagaaggaatgggggggaatagagagcagagctaggggcaggagacagctgacgtgtgagcagacataaaaagaagtccactgtggcagcagagaagcaggagagaaggcaagtgagggagccaggcaccagctcacagaggtcatgtgtgtcaaaacgtagtaatggccttctcttctggagacagtagggagccatggaagatgtttgagcagggaaagcgacatgactggattggcctgttgggtaactcagaccacaatgcattggaagggagggggctagaggcaaggggactggcaagaaggccagtcctttttctatgcctattttgatgaaatattctagaagggaagtgaacaaaggtagtcctagagaggaagaacaaaacagataggatacttccttagtatttgctcattcgacaatttatttttgcatatacactaaaaccttttttattattaaaacgttttattgtaggaaaaaagtatgaaagtagagtgaataataaaatgagctcccatggatctatcacccagcttcaactattatcaatatttggctgttcttgttttaactgttctccacctttttttcctgaagtttttttgaagcaaatcacagacaacatatcatttcaccatatgtacttccctctgtatctctaacatgtaagaacttgttttaacaaaatcaccatgctatgatcatacccaacaaaatttatcataatgtcttaataatacctaatacccatttcatgtccactttcccccaattgctacagctggtttgttcagatcagaatcaaaatccacctgtggccattttactgctatgtctctcaggtctcttttcatctctaataatctcaggggagacaggagggaggacgggcaggacttggggctaacttgcttatcgacacacagttttgcctacttgcttcctcccttcacacccactcttcttctcagccccacccttgtatggaaaaaacagaaattaaagtgctttgcccagcacccactgaagctatttcgaaggagtttgaagagtactcccggcaagacaaatgcctcggtccagtgctcaggtcaaagaggggagacgcttctcagtgatgtggtgtcaatagcagcttagttgttctttcctctggaaaattctacccatctgctttgtaactcccatacctaacaaggccttttatttcacaattagaaaataagcctgaaatatgaatgctgcctgagtgtacctacatttattctagagtttcagggtcaaaaagaatacaaggacctctgcatctacagccaagaggagaggggcaaagacacacagctacaaatgagaacctggctggtcaaagcctaactccacctgtttgtcagcactgatgcaagttaggtcagcccaatgatcatttaggagaactgtgctggcaaataaaaagcagaggcttttggtccccagatacttggatgagaattacaagtccagctggttaaaaggcacatgcccagtgctcacttcacacctactcaggaagcacacttgagttggaaaaccactgtctttacacttagaactcagtcctacatgactcctctaggatcagtgattccatcagttttgaaacatgaagcatgaagtcaaacaggacatgaccttggtttccagaaaaccagatgttcacatcagtctctggagcttggaggcagcacacctggggacttccacatcccctgccgaggtggcaaaagcaggagcagtggtgagttcacatgggctggggtttcctgaacactgctggcaattggagaatctgcaagggaacttctccgactcctaccagcagctgctttaaaataaaggtgatgtagctggtcaaatcctccatgagagagcagtgttgaatggaggaagagacacaacctgtctgaaaatggcacaaaggaagaaagatgtaaacaatgacgagaagactgcagtgtctacaaagctccgaggtgaacagatgggcaccccaggcccgcagcacttccttcagtctctgccagctgcactctgttttccttcctccaggaatcttgtttggtgtcactaaaacagcaattagaatcactttgaaatagtgatagtatttaatataactatgaaactatctgtgattgacaagtgcagcaaggagtcttggaatgagagcctttattttttcaattaaataaaagagttttttgtttctaaaagtaatcttgcagaaaagatcctgcgatcagaaagaaggagggggggagttttcaaacatataggagatcagactgtgcctatgtgtgtatatacctacaaacatatatatatttaaaaaattgttttactgtcaattacagcttcccacactcctagacagccgttctcaaggtatcaatctgagatcttggggaggaatattatctgatatgtcaccaagaattcaagaggtgagtagcctgatggtagtaattataatttcattatgtctttccaccatttaccccacttatgtcaaataatttaattgtatttcaaacctgttcaaggaaaagtacatttgatctttccatctagcaatttcaaagcacctgttcacatcccaaattatctgtgctcttaagtaagaggcagaaagaaaggaaccacccttctgatttcacatcaaaaaagaaatgccactggcaataagcaacttgcctggtgtggcataaatcatcagaagacttacagttgaatctaagtcttttcagtactgaggtggttcattattctgttacagtcttaaaattcacataaatatatactgccaataataatagcatacacctttatagcttacaggcactcttcttctaagtgttttacctatgttggcttatttcatcataaagaaaacaatggacttttgtgttgttttgtaaaaagatgcgcacattttaattaacatctgattgcacaagtctcctcccatatagaaatggattcttccacgcaatagataagaggtgctggggatatgatgatgaacacacagatttggtcatgaccctgtgggaaagagagatgggaaaaaaacaattctcttcaagtgtgatgagtgttacgaaagggagggaaaagttgaaacaggtttttttccaaacttttctccctccattattcgcagctgacttgggctccaccaacctggaaaactgcatggttggaatctgtctttataaaacgcatctcaacctgggccgagtatgcacactgatgtgggaaagttagagaagagcccattgtactaatgctcacctgctacagtgggagtctctgttaaacagtcttttcttcatagcattaaaaaaatttatatcactacaataaggttgaaattgatagagaatgtacaaacaatccccaaagtatatcaacactcttagttctgagtagaagttccagaaggcttcttgactgtctagatagcaagtctaatcatttgtgaactaagttaaagcagaaggcccagtttatatgaattggtattacaccatttgacctgagaacagccccttcatctctgagtgctttgactaaatgagcaacataataatagtaataaccccttacaagatgtcataagactcactgttgttgaagcaatttgagattttgactttattgaagcatagatggtgattataggcatgactcactgtgtggattctccctgggctcatcagtttcagagggcaagtgttggcatgtggacaaagagagggatgacacgtaaacatggcttattgcaatggggaaatattttcagtctcactgattgaatcctaatggttttataaattccccagtaccactgaaagcaaagcaagtaatcaggtgtgttttaggaataaaagcagcattattttaatttcgtattttcccctaaagcaaagccaaatggcattatgggagccaagctactggcagctccaccagccttctcctgagttctcggcattacagatctaccctcaaaggatgaggccagcaagcaccacagggtgcccacatggagaagagaaggccaccaacctcctcttagctggcacagaattgaaaaagtgtttttccaggaatggatacttcatctgttctgtatttgctagaattttaaaacgcacacacagacacacacaggcgtgcacacacacacgcacacacacacgagaaaaccacaaaccacacatttcaaggaaatggaagaattcattggtaaaattaagctaataagattattttccaaatataagaaactaaattttagactatttagccaaagaaatttgctctgatcttgcttttctacaacagaatcattccccaatcattttatttccctctttttctccccagtatccccatcttggtgggacaacagaacccaagaactggcttaacagtaaaatattttctgcatttgcccaaggacacattcccaacgaattcaaataaaggagactagaagaagagaggctatactacagtgctctaggggtcactctgtgatttgttgttgttgttgttgttgttttgagacggagtattgctcagtcgcccaggctggagtgcagtggcacgatgtctactcactgtaagctctgccccccaggttcacgccattctcctgcctcagcctcccgaatagctgggagtacaggggcccgccaccatgtccggctaatttttttgtatttttaatagagacggggtttcaccatgttcgccaggatggtctcgatctcctgacctcgtgatccgcccgcctcggcctcccaaagtgctaggattacaggcatgagccactgcgcccggccactctgtgattttctttaaggctcatcctagtattctcctagtccctaagtagatggcagtaggttttgttttttgtttttcgcagctggattaaggattgctgagaatatatggatgttttcttttaaatgtggaagtcaaaccaaacgttggagcattggcctcacagcagattatgactctagctgccttaaaataacctgaagactttgccttgccctagtttatccatcggccgagtatgcaggacttgctgtgggtgaccaggcccctcatgcagaatggtggtccagagacctttacaaagctgatgggcatcctgtctgacctcctgtgtggctaccccgagggaggtggctctcgggtgctctccttcaactggtatgaagacaataactataaggcctttctggggattgactccacaaggaaggatcctatctattcttatgacagaagaacaagtaagttttctgagtcctgcttataaattggcctctcatgttggttaagttgatggtttaacacttctaggtgaaaccaaacctggggttgcatctgtcttgtcttgctgagtggccttaggtaaagagacttctcccagaaagtccacttccccttgcagaaagggggcattgcttataagcaattctggacatgaaccacagaaagaactgaggcccacttggaaagggaacagaggggccatttcccactgatgtaattgaactagggctaagttcaagaggaagagaatgatccgcaaggaagcaacccagagttccaggtgaagctcaggtcagaagggccctggcaagtaaacacggctgtgggatgcttttacaaacacaatatcgtgaaaatctatgtgtgtagtactgaattacattccaaatggcaaattcctggcaaatcatcttccccacctttcactatttttttttttttggtcttctatggggtaaaggaggatggggtggggaagaaatgtaactggctgcccctctagttaaaaactgaaaagaggcagcaagggacatgccaaaagtagttggactctaagatagctacacacaacaaagcagctaagcagctaattgaagggaaattactgaggctcaagctgagattccaagcgggggccttgtttggcctctcagtccctttcatctgagaaaggcctcagttcctagcagtaatcagaggcaggcttctcagcctccttctcctaaagcagaataaaccacagggcaagtcgcatcctttgtttctctgatgaggccattactgagagtcactgtggcattttgctactaatgatgagcttgttattggtggggtacagcctattaatttaggttattcatcaaatcctccagcatggagttgaatgagacatgtgatgtggatacactaatgactatattgagttacaagcaatggggagtttctgtaaaatctgtcccttgtctcctggcagcatccttttgtaatgcattgatccagagcctggagtcaaatcctttaaccaaaatcgcttggagggcggcaaagcctttgctgatgggaaaaatcctgtacactcctgattcacctgcagcacgaaggatactgaagaatgtaagatcccagctgggcttgccttgtgtaccctggacctcccagaagtgtgtgtgtgtgtgtgtgtgtgtgagagagatgtgccttcctggtagcacatctcatgtttgttttttgctaagtggactcttgcgtttcctcccccatccacagtcatcactggaatgctttgcttcagtgcccctgcctgggccctcccctctctactgcagcctacaatgaggttttctttcccattgcttgaattatatccctaatggaagggttcacaattctctgaatcctggctactcagataaagacagggaggaagggaggaagggtattttctcccagggggtccaaatctagctttaacgagggaggttctgagaaaataatatcatcaatattacatggacttctgagatactaagaaattagattctgtcagcccaggaagttgggagatggtgaattgttctgggaaatagcaatagactgagaaaataaaaacacttccttgaaaagcctttccctaacactaagtgataggggcagaaaagacacaaccaaaagttctctctcacttttctctctgttcgtgtctctgtcttgatctctgtctggttttaggccaactcaacttttgaagaactggaacacgttaggaagttggtcaaagcctgggaagaagtagggccccagatctggtacttctttgacaacagcacacagatgaacatgatcagagtaaggggggttggaggatggggaggggaggggaggaggaagcggtgggggcaagaaagttccacttgtttccttttcccaggaaagagttaatcgctattggagttagatcaaaatacaacaagcaggccccaaaggccttcattccaagcagtcaccaagtggggtcactgactttggatgagaaatatgtttcttgaattctgggagaagtctaaaagctgccacaagaccagtggcttcctggagtttcctacttttatgaattcactcaagggcctcaaattcaaagaggcatctccccaaggggccagctctgtaactccaaagatggtggaatgtgtttgtctggtctcattttcagctttgcaaaatgaagacaagagttctatatatcagggacactcaaaagaaaacaaaaatatccataagcaaaagaaagctttttatacaccatattcaatgacccccatctggcccctcctttgcccctacacatcttccctctattctagagacccatggacttggggaaatgggatatagataggtatgtttcatagtggaacaagctcaccagctcttcagggagccttagcatctctatcctcaatcactaaaaattagaaatggctgaagaacaagaccaaagatcctatggaatttctaagcagagcagtgactgtatttcttcttcccaaggataccctggggaacccaacagtaaaagactttttgaataggcagcttggtgaagaaggtattactgctgaagccatcctaaacttcctctacaagggccctcgggaaagccaggctgacgacatggccaacttcgactggagggacatatttaacatcactgatcgcaccctccgcctggtcaatcaatacctggaggtaaggggctgcaagccccacagtgggccccttgaagatagccccatgagtggggccagagctcccttagcaagtcaagtggtcttgaatttaagctttcattttccccactgaagaaacaagaatccctacatcccctgtacagttctcattctctaacagcttatccatacttaaaacttatctatgctgaaaacggtttcctcttcacatctcctacttctcatgctgggcacctcctcctgtagccccctttaagcatctgtgtctgtcctcaaccctcttctgtctgacattgcttgagtggccatctatggccagtgtcccctcaaccccacagtccattgcttgctggacactcctgccctcaagttctacaagcacatcagcctcaacatgtcccctccaaaaactgtatgttctccttgcccatagaacatatccttctcctatatttcctatcctaattaacgtcctcagcatttgcccgaattctcaagtgagggatttcagggtcatccctaattttccttcttcaccctccacacagtagctgtcacttactgagtgttactttatgccaagtactgtgccaactgcttttacacacatatgcttcatttaattctcacagctccatgaggcttgcaccattatcattgccaatttgcagatgagaagccagggcttaaagaggttaaataagatcccacgcatgaccattaagaggagcgaacaggatccagctctgggggtgcctgagttcagagcctgcctttctgatttctcttaccaagctttgtctcctctccctcctaaatatctctcaactctgcctcttgcattccaggctctctgaggactagaggccttgtcatctctgcgccagcccattccaagggcttccttcctggaatccagggtccagcctctgttggcccaggcatttctctacactggcaccagagttacattccgcacacctgcttacgttgctctctcacttaaaatcttaatgactcgacccccaaataacacaggtcccttccaaatctgtcctaccccaccttcccagcccttgctcaactctgctacctggccctttcacgcctacaggcattcccattccatgacctcttgggattctaccctttgcaaatgctgttttcattgcccatttattagagcgcttttggtcacaagctttttgcttaaccaaaaagaaagcatttattggtggacataaataatgaagttcaggaggatccaagagttggaagccaccatgagacccctgtgtccttccacctcacttttctactcgcctctgctcagcttcatctctggccaggccctctcctctgctgatgccctagctgcttacagcccttagcagtcatctatacaccaaaaatccctttcccatagcagaagcaatgctcctagagagtttccctgttggtctggctcctgtacccacccctgtgtactctgattgggaggcctgggtcagctgcccaccatggggccatttctatgagcaggattactgtgaagtggaggaagatgtttccccaaaagaagaaacacaaggtagaaaagtgtatgtccaccaatgcctgaaatgactgtccctttcctcatctgctgagcttctactcattcattctttgagactcagcactcagctcttaaatgtcacttctgctttgatggaggtttagtcattcactcctctgtgcttcctggccctctcttcacacctctctcagacccctctcccagatagattagagttggctgttgacatgtccatctctggctgggcagctaaactggagttatttagaatcagggagcacatgtcagtcattttcaaattctcaacctcatactcccagtaaatgactccatctaagggtggaccactcttgcccatgggccaggtctgggtctgtgtcatctagaactgttggaaggtaggggcttctgtgagcagtaggagagggaataaactcgagggccctcgggagcatgccctcttgtctcagacttgtgagtcctgaggataacaaactagtgaagaaaagcctcgttctatctgtcacctggtgctcttgaggactttctgttgccctggtgccaccacaattttccagagtgtgtgaccctcgctctccaaactctggaagtggcagccgaggctccccagtggcctttcagaaggtgccagtcatgacagcagcaccaaactgcaggcaactactaagcgatcaccaacttgtctgaagataagaatgaccttgaatgcattttataaaacaggattttttttttaatttttagattttctttctttattttaccttaagttctgggatacaagtgcagaatgtgtaggtttgttacataggtatatgtgtgccatggtggtttgctgcacttgtcaacccatcatctaggttttaagccccacatgcattagctatttgtcctaatgctctccctcgcctcgcccctaccccaccccaacaggctccggtgtgtgatgttcccctccctgtgtccatgtgttctcattgttcagcttccacttacaagtgagaacatgtggtgtttagttttctgttcctgtgttagtttgctgaggatgatggcttccagcttcttccatgtccctgcaaaggacatgatctcattcctttttatggctgcatagtattctatggtgtatatgtaccatattttccttatccagcctatcactgatgggcatttggattggttccatgtctttgcaattgtaaacatacatgtgcatgtatttttatagtagaatgatttatattcctttggttatatacccagtaatgggattgcctggtcaaattgtatttctggttctagatccttgaggaatcacactatcttccacaatggttgaactaatttacattcccaccaacagtgtaaaagccttcctatttctcaacagcctcaccagcatctattgtttcttgacattttaataatcaccattctgactggcatgagatgatagatacccatttgtcagatgggtagattacaaaaattttctctcattctgcaggttgcctgttcacgctaatgatagtttcttttgctgtgcagaagctctttagcctaattagatccatttttcaattttggcttttgttgcaattgcttttggtgttttagtcatgaagtctttgcccatgcgtatgtcctgagtggtattgcctaggctttcttctagttttcatgattttagattttacatttaagtctttaatccagcttgagttaatttttgtataaggtgtaaggaagggatccagtttaagttttctacatatggctagccagttttcccaacaccatttattaaatagggaatcctttccccattgcttgtgtgtgtcaggtttggcaaagatcaggtggttgtagatgtgtggtgctatttctgaagcctctgttctgttccattggtctatgtgtctgtttacaaaacagattcttaagcatcaacccagatcgactggctcagaatttccagggaagaggcctggttatctgcatgtttacagacctattagatttgtgggacctgcagttcccttgtacagttagttactcaattaacatctccctcctctcatggtgcctctacctgctaagcccttattcccagccaggcccaccaccatccacccactgctgttataacataagcaggacctgtgcgagggggtgtggacggaggagagaggctctgttgcttcatttgtgcagcatggagttcagtggttctcacaatgtttttgcaaagtatataaagaatactccttgtctacttgacattcgtatcgtgacataaatgtcttgttttccagaaggattattttttccaagcagcttgttcctaatgcagccccaggcaccaaacagatacttaaaatatattaattgcttaaatggttaagaattcagtctctggacccacactgcctgggttcaaattcctattatctgtgcccagtttccaagtctataaaatagggatattaatagcacttacctaataggctcgttatgagaattaaatgagctaattcatgcaaagcactgacatatagtaagcacttaataaatattagctttttaacaaaatacaagccaaaaaacactgcttaggagaggaaatgatgttagtgcctcctgtaaataggcccagcctccaagctggtgctcctctaggaatcacaacgctgcaaatcacatcctccggggccgccaggacttcacgagggcctctgagcagaggggtatgatgggagcagaagcccagcagctgtgatgatgtggtttctgatcttcctgcccttggggtgggggaggaggaaagcaaggggcaatgaacagaaaggagaagatagcggggaggaaatgtgtgaggaagaaacacatcactgtggcttgtcctggatttttctgcttctgttctcgtgttttgggaagtctggaggagacttgaaaatcattcatgtccccaccctgaggatggcttagtagcagagaggccatgaaaactctttgctgatggctctgaaagcaaggatgttgcttcactgggctgctgaaggcctgcctgggggttctgagcagagagtacaggcccctcccaggagggcggcctaaccaccatgctggcatttctgtggaccatggtctgctgtctcagaccccctccacaatagggtctgcaatctcattcaccccataaatacattctgtctttcctctgatcccctcccattagcagggggaaataaatggaagtcagacggcccagttagaaggcaggcagtggagtaggaaaatagatgatggtggtttggggagcctcacatcactcatggggagacattcattcccatgggccttccaatcacccttttctccaaatctaaggacacaggacaaatgggtcctcatacaggcaaatatcttaaactggtatgtgtattcatttatagttctaatttatatgtgtctttattcacatatattttgcttctggagaaaagctcaattagaaaaattaatacattattcttcttattgcccttcagctaaaacaagcatacacacccctcccctttggattttttgtttagcaaaaggttaggcctggcacagatgaaatactattcagagttcacagtgtattttcatttcataatatatttgattttcaggtcttgaatttcacatcaggaagctgatataggaagctgaattcagccagattttaatacgaaaatacctctgatcaaggcataaaattgtactttaaccagtaaccactgtatttctctaagctgtgaaaaaacatgcattcattaactgctttttcctctgctgtcaacacagtcaatacatgtgcataactccttattgtctacatggtgattatcttgctgatgaattctcaaaggccagagatttggactattttttctctgtaaccttgcatgttcctggccacatgccaccaccacccaaacagaatgtacgcagggaatgtatttttcaggataacctaagaaaaaataggattaagaagataaagctgctgatcatgtaatgtactttagactcagatatataaatatttgtgaattatctgtcctatttctttcttctattaattcattgactctagatgtgcattggaaggctagggagaaatcaggggatcgtgagaaagagcacagaagtctgcatcacacaaacaatattatttcaagagccatgaactagatcctaagcaactcataggcaatgacctcatttcatacctctagtctctaagaaacatataactggcctgaggaaggaaaatgtgggcaaggggtagaccggggtcatgggtggaggtccaaatagtaatcaatggagctcatagggtggactgatattgaagctgctatgagccagccacatgctgggcactgttacatgtcatctcatgcaatactcccaattacctgcctagtaagcataattgtcattttatagaattaaaaacagactcaaagaggttgacagtctaatgtaacacaacagctaaatgggggatctggaattataatccagagctgcctggctctgatgagaaagctctttctgctgtcatatgcagcccacattaatagggggctcagaaagtattctctggataaattatataatgaatccaatgaaggaagacattattttataatatgcagcataataggcactattatgattggattttcctgcttgaaagtagctagattagagtaggaaaccaaaaagatgtgaattcattcagtcattcatgcatttgcatggattgagctacctacatttgaataaatgctgttaatccctgattccttggaagctcacattggagagataagcatgtcattaaataatgccataatagtggtatctcagaggactagcagaacataattcaatctgacagagtagaaacagattgtacaaatccaattcaaaacatcataaatcctctaagcactgtcaattcttcctccaaattatctctgaaattcctccttctttcccatttatggcctccatttacagaagcgtgtactgtctctcttagctgtttgccaggccgccagtctcttgctgttcagctctcaactgcttccagcaagatctttctaaaatcccaggcttgccaagacttagcgcccacagctccacagtgactcctcattgctgttaaggtaaaggccttcccagtctagcccttcatgcttcttccatgttctatgggactgccccaggcttcccacctggtaccactgagcctttccatccttcccccactcgactgccaggtcaacacccacacccacgcttcaggactcaggtcctatgtttcgggccttcttctgtgcaccattcccttccctgtagcccttgatcatgatttgtttatacgcctccgcaccttcatggccctgaacccctcaagggccgaaactgccttacttttctttttgacttcccaacttaccttagtggagctgtagtcacatagaatagacgctcataaatgcttctctgggctgtaaaggttgaattttccagctaagcaaggaagaaagacaatttcaggcaggaggaagggcataagcaaagtgcagagatgtgaagctcaagagaaatggatgggctgggcagaggtgtggctgcagcatcaggggagaagaagtagtgcctggagtcagcaggcacggcttgcaaaagcttcacctataggtgaaaggacaccatctcttgcaccaataggctctgtgattggaggcaactttgctgttttactgccagaaaactgaggatgataacccaaactgcagttcaagtggcattcactggtgtggctgaaatgggtgtttgtggccagaatgtggtctgattggtcagtgcccagctctgttgattagcagatgttttgaatatagtagcatccatgtgcccaagttgttgggatgattcaacaagaaactttaagagctcaagtgccctgcagttgtcagccaggtgattctcttcctttggacccagttagacgcaggcattacctcgtggctttgccccagtgtgaatctttgtcctccaacttgatctttttatttgtttcattattgtatttaagttgtttattttagagacagacattttttaacagctgtgcatttcctgtccctttgttttccagtcgtcatgtgtttccttactctctgtgggtgaacgtttcagatgtctgtttgcggtgcccagcgtgcaagataaaatttattgcagtgccttcggcctctaactcaccattccaaccaattcagatagcccaaggctgttttatccagtggatttttccatgtagtgggaaataaatcttgaatgttactgtttagattagccaggaaactcattctgggatgtttgcccacatccattggcatttctcaaaaggaaccccaggtgtctaccttgacaccagcagggccacttgagccctccgctggcattcatcgcccgctttgttctcagcctgagtttaggagttacagatgtgagaggcgggattatacagccaacatctctaagcgggcagtggctcccttaccctcgaagacctcactcctagcacgtcctggatgtattcgtcaaaatatgtcctcttatgccacgtcagcacagggttgctccccactttgatcatcaagtttaaacaaaaggaaagattttctttctttctctgcctctactggacatcatttcccacctaacagataatttaatgtatctgttactgaatgtgtttgaattacagacagagaggtcacagttaaagaaggaagcctgctgctactgcagcttgtcctcccaaggaggtgtttgatttagctgtgtaaacaaatgactgcattctccagaggtcctgaacacagctgcctgcgctggagagggctcaaacctcttccgccagggtgaactctgcttcctggtgagtgccagcaaaacaaccaacaaagagctgtaggacttgtgtggacttcaaatggtggtggtcctgccacttgggctcagccacagcagttaggaaactaaaggggaggaggaaagccctttccttgctttattgtcattggctgtcatagggcattacaatggttctctttgagattctgagctccggctataacatttgcccagaatctgcctctgaggccttaagacactgtgtttttattcagcaaagatgccctttgactccttttcccactagtggtgctaggtttgagcaccttacactggccccttacaatagccagttcttgtctacctacattcttccctaacattcatgattgcatagttactcttagtgtagaagcagacagcttttacacatagactccatggccgtagcctcatagaacctactatattctaacttgcaagctaatcagaccaaatatatcaaaatcaaaaacctctgctgagagtttattcattcatctctgtctcccaaacgtacttatgtacatacgtgcactaatatacatgtccattagccaagattttgatttcagggatcaaagcaagtaccaatagggaatgaggtcacttgctgcatggcaggtggcttccccatgagaatgcaaggccacctcatgactcatacttcagagggtgacccaggaacttctgattcatgtccaaagcagcttctacaattgctctaccttgatctagggaagatgtggggaggatgacattcgggattagctttataaggccttcctgtgggcagagttgtctgactttcacctagtgatcaacaagcagctagcaagcatcagtgtgtgaggccccacgccctctcagctcccctactgcccacctgggacatgggctttggcatctgtccatagcattgttctaaccaaatgaggtgttatggatcagctcaggatgggatatgttcccagacatattatttaaagaaaatagctcccttcctcccctgataaacagctgccatggctaaaaggtaacctggctggggcttaaaagtctgttgactttcaagatattttgcaaaaacagtcataaaaatggtatttatcagatcctaactatttgtgagacggtttggtataccatagtggttaaaaacacaggctctttccagaggaggtttactttgcttagtcgtgtctcctaagtgaacttggacctcataaggttgttgtgagaatgaaatgggtgaatatgagtaaagtccttggaccagttttggccgtatagtaagccttcagcaagcatctgcttttattcctacagggaggcaattgtaagcccttcacaaacagcgtctaatgtgatccttagaacaaacctatgagatagggcatatctcaattttgtaggtagggaaacagaagccacacaattaggaaatggcaacagatctgttagactcttaaacactatgctacaccaatttgcaaggcaaggaagacaaagcacctttgaaaatgggtcagatgttttagggtaaatgaacgtttgagaatcttttaagttttttttcccccagagattatcaaggtatcattgtagggggatgcatcaggaaacatgactatgaatcagctgcctgataaaccagccaggatggagcccacgtcatcacagcagtcagcaatgccactgaaaaacatcagctgcttattcccgtatagatttccccttaagacatgaaaagggagttcaaagagaatgggccagatatctctgagagtcatattactaaaatatatttatttttactagcttttttgttttaagaggtatactgtcattagcactgtagcaaaaattcacgttttattaatttctcctagtttatcatgtgattctagggtaggatgcagagttatattcaaaatacacaaatcaactcaactcagtaaacatatatcgaggccctatcatgacaaaatgctattctagagaccacggcgaacaagccacggccccagcctcaaagaatgtactatctttggaactgtgctggccaatacagtaaccagcagccacgcagggctatttaaatttaaattaattaaaagtaaaaacacaatgcctcagatgcattagccacattttaagtgttcaatagatatttgtggctcctgcctgccatattggacagggcagatatagaacaattccatcactgcagaaagttctactgaacaatgctgctctggagcagaagatcttcttgttcagggatgttacacccccgcttgtggctagagtgtggcttatcctcagagcaaggataggggaaccatggcactctgcaggctcagcactgaagacacggatgcaggctctgcttctgacctagattgaccttgggcaaggccctttgctcctctgatcccaatttcttcaccagccaagtaagaacatcagaccacaagccctctagggctctgtccaaatgccccatgactgagtgaactggtagaacattctatgtgtgtgtcacaacatgaagagcaaagactttcatctccccaaataattttgtttttcgttttaggaattaaatttcagattcactctaattgccaatactaaaattctctatatgcagttctaaacttgacaaaccaataaaaaaagattatttgactacttatctttgtacaacattgaggtctccctaaagcaaatttaaatgcatattttaaaaatgtattctagcagttcagttcagaagccccctggcccaagcatcacactgtcaatcctttgtcctcaagcagcatggttgggtgggttaagtactgacaaacactgggtgtcaggcccatggtcagggactgtgctaacagtctacatattagatgccacctacccccaccctcaacagacccaaactatttatccaatagcaaaccttgcattatttctgtccagaagaaacaaacatttattgacaacttttggtgtgtgacctgtttaagtcctacatctcatttaaggactggtcaatgttaggctaggcaatgcctgtttgtgagagaatcactgcctaaagaaaattctccatttcccttagctctatggtgggtgactacacatactggtatttcttaaagaaataccaattccatttccttttaacataattattaatatctcattagcatggtgtcactgaagcctgggcccaaagaaataccaattccatatcattttaagatcattattaatatctcatcagcgtggtgtcacttaagcctgggccctttagaatttttcatgtacctgtgttcctctgcccatatcagctggaacactaatagttttcttcctttttatctagaagactgagaacattacatgggacctgcccccagggcatggaggctgaggtgggacagtttagttcaggaggcccaagaagtgttgggtgtgcagccccttgttcaaacacagcctctgaatcgccagaggcttccggtgcatactctgaggcgcaggtgggactcgggagtgagaggtttcggcgaatgaattgggattgcctacttcttcccagtgcagtggagcttggttctgtggtcaggtccttacgccctgtctgcctttctcgtttctttatttctcgggtagtagttgtggaatcaaatgacctggggtttgatacctactctaccacgcctctgggggagtcactcagactcgttgaacctaagttccggggctgccaagtgaggataagtagtaattgctgatccacctacttgacaagatagtagtgagggccctgagcgccaggctgtggatccagcctttcccacggttcctggtgtggcaggaagaactctaggcctgaaggtgaaattggggagggagtcccagctctgccactgtctctctgggtgacctcaggcaggtctcctcaaaaaaataagatactttataaagctcagtttcctcttcagtaaaatgaggattccaggtaactcacagatagtttgtggggatgaatctgttccttaaagcctgcagtacatcaataacccagtcttcctgcttgctttcccccctctccactaccagtgatcatagtctgatcccataggtgatatcccagctcaaaaccctacattagcttctgtggctgtttaaggcctgcccagaactcccctggtcttagcactgaaagcacgtgtccggggaagccctgcattggtcgttcatactactgagtcccgcagggcaaaccgtccggtcccaccctcctttctagtgctgctgtcacactcacctcccttcaccctacactcccttctgtgccttgcaattacctagggagttttttacaagatatggatgccctggccctgccactagagattctgatttaattgcttggggtagggcctggcataggtatcttttaaagctccgcagtggttctaaagcacagccacagatgggaaccactgatctattcttgtaggtccccagatacctcatgtgctgttccctgtgcctgagctgacctttcccccactttcctctcctcggctaattcctgcttatcctcctactcaggaggctcttcctccaggcagccttccctgatccctccaggaagacttagctgcgtccctccgctgggcttccccaatacactgggcttgctttcattagaacctgatccttccacattatggttgttggtttgctccaatcctctccctcattagctctcaactttctttcaggaagagatgtttatctttccttcttgtattcctagagtcgaccaggctctggcacattgcagattctcagtatgcattcagggaacaacttaatcaagacaagaccatctgacttcttgtgagttacatgctaagaaagaaatgtcgacaccaatagccctcacaatgataggaacaggaggttaaagaaaaggaaatagatgcaaatagcaatataagtgctttaacaaatctatacaggaggacaaccatcatattcaaattttcaaacattcttagttctgctcttttgtgggtaatggtttttttttttcctcttccaggagaagaaaagaggcatattatagaaattcctcctcccccagcattacttgtcacagaattgtaattggaagtgatttccctgactaagttattttggctgtctgttattttctctcttcctccttgctcttccctcagctggccatcctgtgtgtttggagagagccagaaaggttcaaggctaggaatgtttctctctctctttaaagctctttaatcgtcaggctttctgatcttcaaagcaggctgtagccagtgtgaccccactccctcgcctccccatgctggagagtaaaagcctggagtatttttgtcattttgaagacttgcatatttggacagccttggacatctggaaagtgtggtcctcactagctctgcagggataagagcacgtcagcacttccaagctctctggcgcccctacatctggacacgttgaaaaattaacaccagactctggagttaagcaaacattaagtttataggcctccttgcatttgaccatttcctgggacagcagcccttatcctgtgactttctgtgtgtagagttgagtctttgcagttggtcctcctcacactctctcaactttgtgactctctgcagtgcttggtcctggataagtttgaaagctacaatgatgaaactcagctcacccaacgtgccctctctctactggaggaaaacatgttctgggccggagtggtattccctgacatgtatccctggaccagctctctaccaccccacgtgaagtataagatccgaatggacatagacgtggtggagaaaaccaataagattaaagacaggtgatgtttcaggaagggctcgctgcatttctccaaagtcagtgggaaattacatttggtagagagaaagggattgagactggactcataaatcaataaaattaagttaaataagaaaaaataagatattttataaagctcaacaaagagtccttgaatgaaagcaattacagagtcacattgtggctaatattcaaaactgagatttaaactgaggactaggaaatagaattggatccttttgaagcgtttaggagaaagattttaagagaatgagttccgagtcaccctgtggtcgggaggtgtgagtgagctatccaagcccgttcccatcctttgtccctctgtgtcttctcaggtattgggattctggtcccagagctgatcccgtggaagatttccggtacatctggggcgggtttgcctatctgcaggacatggttgaacaggggatcacaaggagccaggtgcaggcggaggctccagttggaatctacctccagcagatgccctacccctgcttcgtggacgattcgtgagtctgaagttcgcgatcctcctccatgacacgctaatgggggtgctggagtgggctggggtgggctgggggtgccctcaaggcttccatgtctttagagagagccccagggaccagagccaaattggagagcatggagctctgactgaggaacctgcttctcccaagctccaggcaggcacagatgagtcagtgcagtggtgggaaagggaaaagagttgatgttgtagctggaaaagggaaggggaaaattaaagcaaggaaagtgaggctgggggaggggacaaattccccactatgtagtatgtttggtatgtggaagggttctggtcagaatgtttgcccaatgattgccacatcagcattcattttggactctgtatggccagtaggtctggttcctgggagccctggaataatgcagccccttccctaactaacatttccatgatgtatgctcaatgacaaggcagaggaatgtgttggatgagctcaggacctgcctccctggacactcccatcccaggcctgtatatctgttgaccaggaataagccaagcaagcagcctactgtttgactgaatatggatttggggggtggtagagaaagggccggggtggagggttgggaggctcatttgtcattatagatggggtcagacacactaccaaaacagcagcagagatctacaattgagttcacctaaaactcagtgtggacacaggaaaccctcttttaataactgtccaatgggttttccagcctcagctctacagaaaacttgagataacagtggccagtctgcagttagtttgggttcggacaataggcagagctgggaaatggagccaggggcgaaagcccaggtccactttaggatcaggacgggagtggctggtggggaagtgaggtgggtgtggggaggcaatagggagctgggtcatttggtatgggagagtcctctggtggctagtcccagaagtgcatgctttacgaacatatgcttctctccctagggccaccttgagtgaaaccctcccatgctggaattgggccctttcagtgacaacacacaacagttttcaatagataataatcccaagggctttactagcacatgaaacacagggaaaacgtgtaaagttcacaagaaagtcgttccagtgtatcaaatctatcctgtttgccaggtggatataccagggtctcctccacctgtgcatggctggtggtgggtccagtggctgttggataactgatgtattgatggatcattcgccttctgaaagtgccaaactgattagttattttgtgtgtctttttgtgtaactagggtttgaccttccagggcagactgtgctggggcggctgaccccttggggagccaagttattgctcttaccaccaccacttgcccttgtcagtcctccaccctcttgggtttcagtgtcagcatgtagctgtctactcagatcccatccacatcatcaagtctgcagttttttccttgcaaggccttacagggaagatctttgacatagaggatataattttattgacacattttacttgcagagcattcacccgggctaaccagaaagccagcactctgctataaacaaaaaataatgcttcagggctaacatggaatgtgttaaaagattccagcccattaaatgtccaggggaggttttcctgttttcctttccctccatctgggctttgttctcaacacattcattcaacaaacatttattctgcctctaccaggtacagagcactctactattctgcttctctccttttgctttagtttcatgatcatcctgaaccgctgtttccctatcttcatggtgctggcatggatctactctgtctccatgactgtgaagagcatcgtcttggagaaggagttgcgactgaaggagaccttgaaaaatcagggtgtctccaatgcagtgatttggtgtacctggttcctggacagcttctccatcatgtcgatgagcatcttcctcctgacgatattcatcatggtaagccaaatggagaaggcccagaaaatcttgaatactttggttcctttcccctttcctcctgttcatgtgcctggattagtcatgtggccaccaaggagagcgtgacatctagcttcccagcccttccttttagccaacgtgggagacactcaaagagacgaaatctcctgaaggagccactgtatcacagcatcctcccatctcccacttcctgcccaggggtccatggtccacacagacttcccagtcccattccgtgaccatctggagaagctgctattagcagagccctgcacagggtgatagtgtaattaaagtggtcttctctttccaaacacagaaaaaatcagttcagggagtgttttcctgggcttacaattttaactactggctagagttgaaatggggaaagccttttgccttttcagtagcagtaggggaggagatctggattatttacttatcatcatcatggtcacctcctacatggcttcaccaaaaaacattctgctgcctgaaaaagctccaacacctctctctcttttaaaggatggaatttggagtccatccttcctcagtgataaggagtttttatagccacaggcagcatctattggtctgtcctctgcaaacttgcaactcctctgagagctagacttggaaatgaaacattattttgcaatgcgctgctatccttcatttttagctcctccaccgtagatgatagtttgtacttgttaaatgataaggatataaatttaggtcattttttatattttattgggtggaatttggtataatttttagacttcaggctttacaggctcctgagatggactgattgagcttgttctacttcttccccatcatgataggaagtgctgtaccacactaggcagtgtgtgtagtgaccacagactggctgagtgtctcccatcccatgctggcccatatctggtacccacctgatccacaaatgttccatcagatcctgttcaaacaacacatctccagttaagccaaatcttgccctttctccttacggtaaaatgtactaaatctgaaggttttgtctttttaatgttgctccatgatccagtgatctgtggccttggttatgctctgtgctagagtcctaacaagacaaatgctaaggtagaggtcattctgctcaaacaacctgaccccacctggatgtgggcttacatttgcaaagggcaccaaagttctaagagatgaggggaggagctgagccccttgtccttatctaggtttcccttgttctttcccatccctcagtctgcttcttttcccagtaccaacatgtttgtgtcctcagaattaaaggagtaaaaatgtgtaaacatctgactagcaacagccatgagattttgcctggcttgttgataagcagcattgagatctgccctcctaagaatgggccattaggtcttcaaagcttttacgatgtgaggtaaagaatgttcaccaggagtttcatgcacaaaagggtttctctttgtgggaactagaacattgttccagtgatgacggaaacagggctttccataccaaaacagggttttcctttgaatgactctcccacctttcccttgtctcttcctccccacctcaacaacacaggaaagaagctggaagcagggacaatgggaaggtccctttgttactcgagctattagaaacaaaaagaaaagtggccatctgaggaagccacagctggtgaaactgtagggtcacagagtgaattacacctctggcttaagtcagtgaaaagtcctagaagtttgtggtcctagaagtcctaaaagtttatgggactttgttttgagcaaggataagaaattgatttcaggctgggcgtggtggctcacgcctgtaaccctaatactttgggagacagaggcaggtggatcacttcaggtcaggagttccagagcagtctggccaacatggcgaaaccctgcctctcctaaaaatacaaaaattagccaggtgcggtggcacatgcctgtagtcccggctactcaggagactgagcaaggagaatcccttgaacccaggaggtggaggtctcagtgagctgatatcatatcactgcactctagcctgggcaacagagcaagactctgtctaaaaaaataaataaataaaaaagaaattgatttcattcttctgagaactgcaacaactaccttaaagtgattccatccaaaacccacatgttcagccatggacttgcttttatggagctgcgtgtgggtgacacacaaaatcaggagctctgagtcctaatttagacttttatttagatttcctcaaatttgggttccagttaagcgtgggtctcttctgtgccccgctcccctttgccatttgttttatctgttcttcagtctgttctgtcagtacccacaggcaggagagcagaaaggagaaatggcagccacagcagacaaatggcacattcgttccactcagctctcgcatgcccatcacagatacagctcattggtctcttttctatgagaggaagccagagctccagggaactactgccaactgatcagaactcatttaggacatggacctatttgttcctttatgttcctgggaagagcacaggatgaattctatgtactcatttacgtgttcagagagtaaagtgcctcataggatgcctccagcaaaagataaccaagaaggtctaatacctttgacaatctcagtttatcctatagtgtaattggatagcagttcccctagcaaaagttgctagtttggtcctattttctacatagccaaagtgattgattcattggttaatgtgaaagttactgagtactgccagcaggttctaggaaatatatttgtgtgatattcatggatggggaggatcaatccacttccaagtgatttggattaattactggtattttcacctgtgtgggtagcaaacctcagaaaatcaagtatagatgacggcataggacaggccaggccccaggcaaaatgttgaagctcctctggagttccctcccatctccctcttttgttttccatatacctggtttatccagggccctggagatgctccaagaccccctacccaggtcttcctcccttgtcccagctatatttctccatattaccactcttctcaccgaggatttgcttacttaacacataataaatactattaaaagagaaacttaggcacattaaaatgttagagttgattccagcaaacagtgattcacaggaggctccagatcacaagtggttcagggccccactgaggggtagggaagcaagacaaagaaaaacaaagcaaatatttgattggttcaagtggaaagtccctgattacaggttagtgggcagtttgtgattagttaagtttctctaagttgggttttggtttgctgatgtaggaacacagaatgctggggccgtttcaacctaatggtctcccaattaatttttttaacattactgatgactgttaggagtctaatgtgctactcctcccagggaaaatggcattcctaggattaaaggaactcagcacatggagtgtgcgtagaaatttagacactaactgcaggctggtgggagagagccctttagggcagaatgagaaggcgtccggccaagggcaggagttactgacgcatggcctcttggtttcagcatggaagaatcctacattacagcgacccattcatcctcttcctgttcttgttggctttctccactgccaccatcatgctgtgctttctgctcagcaccttcttctccaaggccagtctggcagcagcctgtagtggtgtcatctatttcaccctctacctgccacacatcctgtgcttcgcctggcaggaccgcatgaccgctgagctgaagaaggctgtggtgaggcccttgggctggcccctgtcctacaacacgtttccttggaagggtccgtagcagtcctggaggcccagcctgccctctgagggggtccactttgcctttgacctaaggttaaaaagttcacgtgaggctaaaatgtacaggggcaaaagtgggagcagtcctcaccccgagcgatgcaacagtgactcctcaccacgcctgcttgattcatctgccctggaaagtcattaaaaaaccagttcaactcatgggtccctttatttactcacaagagagagccagcagcccatttcactagttttcctttcctactctttgagaagaatcagaagggagggagcttgccactttactatctgtctaaagagatgtttccattaattaaaggtttttgttttgcttcaaaaaaacttgaattggagtatttccacaagtatctttaacatgctctaccaatgtttgcagaaagaagtgcagaaatgagactgtccacagagtcaggctcgctggccaggagaggactcccgaagctgacttctgatggcctgagaaacttcctagttcacaattcccagacccagacaaagagcactgtcttttctctaattgttttcaaatgggccatttccaccctctaatcagcctctggccctggagggtgcagttccccttgtcctccggagtctccctgtctctgtgctgtagagtcaagaagggacaaccacctgccctcactgggaaaagacagaaagtctgacttgttctcacgactcacacttattaggctccagaggtgtcagggcatctgcctttcatttcttaggttaaataagaaatcaattgctgccatttgtagtacccaattttctaaaatgatcacaatggataagtggcaagaaatccttatgactcatctgtgggcagagttgggctattttggtaatccttgagtaggcagatggaatttgaggccatcttcttgggtacatagatcactaggaagctataggtctagcaactgtggattagggctgggctgagaattgtttcatgttttttgtgactgtatagctagagactctcttgtttgcagagagacactctgaactccccctggccgtcaagggaaagactgccttcaccctcctgagctgaccttacactgagagacaatggggaccctcttttggccctcccctctacctcgagggcatctgggtgctgttgcattggataaaaggcactgctctttttctgtgccctctccgcctcactgcagagcttactgtctccggtggcatttggatttggcactgagtacctggttcgctttgaagagcaaggcctggggctgcagtggagcaacatcgggaacagtcccacggaaggggacgaattcagcttcctgctgtccatgcagatgatgctccttgatgctgctgtctatggcttactcgcttggtaccttgatcaggtgtttccaggtaagcatcctcctctatagggtaaaggtaattgagttcttcagatccccagccctctccattcatctagtttaaatttcatttcttccaagctctttgtcagaaccagcatttgaagtttaaatctagaagttaaaaatccaccagcaaatcctactggctctacttgagaaacaaatccagaatctgatctcttgtcaccacctccaccacaaccttcccaatgccagtctcttccttccactaccacctcccatcagtccattctgcacactgtattcagggagatcctttcagaatcaaggtcatgtggtgtcagccctctctgtcaaatgcttgcactggcttttcctctctttcagagtaaaacccagtgtctcaaccctggcctccaagctgcttcattatccggcctccaactctcttcttcatcttacgattttccctactcctccatgttcctctgctccagccacgtcggcctccttactgactgtttaatacaccgagcgcatttcctcttcagggcctttccacctgctgttctcatgccagaagcacatttctctccccacaacctgcaacccgcccctcatatctgcaggcttgcttccttactttgttaaggtctctgttcaaatgtcccattatcacagggatctttccagactgaagagatctacataactatggctctgtaaacaacattcctccagggttcctgtccccttaccctactttattttggggaacattcttcaccatctgatacaatgatgtatcttatgcatgtatttactgactctctgcccttagtagaatatgagcccagagagcatgcatgtggtctattttgttaactgtgacagtcccagtgcccagaatagtgcctgacctttggtgggcactgaataaatatctaagtaatctgtagcatggaaaatcagcttctgaaaattggctgtttgcacggtcgtgtatttgcttggtagaaaatcaaattttccttcaaattagcattttctggtaactagagctgccccatcttcctctgagtggtctccaagtcagccaatagccttgtgctgtggcagccatgcctggctcttgatgctgtagccaaaagcaggcaggggatggtgaggctggtccagtccatggggagggacaaactcacagctctcagatcatctcagggcagcctttgttggcagaaataggtaggcagccaccctgaataggaggaaggcttctagactgggtcaggaggcctgggtttgcatcctagtggcaagcgtgcattcatttactagggctgccataacaaaataccactaactgggcagcttagacaacagccatttatatctcacagctctgaaggctggaagtccaaaatcaaggtgttggcagggccatgctccctctgaaacctgtaggtgcttgggcactccttgacttgtagatgcttcctgctgatccttcgtctgcacatggcattctgcctgtcttacatggccatcttataaggataccaactggattggattaggtgcctaccttgctcccatgtgacctcatctcaactaatcacatctgcaatgaccctgttcctaaacaaggccacattatgaggtacctggggttagcactctggtatcttttttcttgacagcacttctgacaccaaatgtgtgttttggttttttgttgttgttgttttggcaccaaccaattctcctatattaatgggttgtccaagaattcaattgaattctgacactatccagaattcacacagactccacgggttcagtcccacaaggcttccccgtcttcagatgccagctggaaatgtggtgcccaggctacccacacttttgccaaaatcctgtacttacaatcacagctttaaaatgaaggatgcagctcaggaactgccacatggaagagaagcacagtatggggtcgggggaagagtttctatgctctctctagacgcaccactctcccagcacctcaaagtgttcagcaacccaaaagctctccaaatcttgttgttcgagagtttttataaccctatctccagctccatactcccccattggaggttgagggttgggactgaaagttccattcttcacatgtgtggtgtttctggtgaccagtccccagaaactgcagctatcttggggctctaccctgagtcacatcattagcataaactcagatgtggtagaggaaggggcttattatgaataaaaaaagacactcctttctgccaggaaattccaagggttttaggagatctgtgccctgcacaggagctggggacaaagaccaagtatattttgtgttatgccacagaccccaacatgtctttttggagggagaccaaattcaacccatgacagtgactttgaacaagacatttgaacttagtctgttttttctatcctactagattgttggaaacagatataatagatgaaaattagttgattaaaattgaaatttgtgcataattcaaaagttttattttagccaagctaaagctttcatttattcaacagctatttactgagcagcacctgtgcatgaggctcagcagggccaggttctgggaacagagcggtggagataaagatccagacctgccccgaggaatagacagtccagtggcagcaaaggccatgaaacatacggcaactcttaaaaaaagccgagaccatgattttacaaaatcaacattttgtagggagcagaactttcaaagagaactggactagaaatttgggagtctttttcttggaaccctggtagatccagtagaatgagggatgggggtgtagggttaaaaacactgacattagaactggattacctgtgttggaattcctacatttctgtttcactatctgtgacggggggcagatggctgaatctcagtgtgcctctgtttcctttctcacaagaataatattactacctatctcctggggttgttttgaggtttagattatttaacacatggaaagcactcacagcaatgcctgccacagaaagaatatccagtacatcttagtgatgatcaccattattattatctgactcctggaaaaggacttgatttaattctctcatgaaacgttttcttggaaaactgatgtcaaccaagattattggtcttgctgttgcttataacaccccaaaaacatgactgtgtggataaaaatatgttggaaggggtagtctttctgggagcctgagaatagccatgtaataataactgcaaatatctatagttacaatttgaggttcaggtaaataaactctagatcttatagaactgcggtaaggtaggatagggagactccttcgactttctctgtttatttgtctctatttttaggagactatggaaccccacttccttggtactttcttctacaagagtcgtattggcttggcggtgaaggtgagtcctttaaaacacaaatcttaatgtttgaaatcaactccttgggctctgtgcaagatgtatatggatcacagaggtggccctctatgtaaacggtgtgattcctgatgagtcagctgcctcctggggctctgccccttgatgggcattgcagcgtctgggggaccacctttcacaagttgctgggccctgtgtgatcatgaatggctgatcatggatgaagccctgggtcctgtacaccttgtccagtagactaaattgccctatttaaaaaaggccaagccacttcagggttcaaagaacttttgcagcttttcagtataaagcagaaatccagggaatcatgaaggaacctttgcattcatctcccattgccttccttgtgcctttttattcttctctgccttttcaaaatataaattagtttattctcccaagatgaagactcctcctggggctgaggcagagctgttatcttcagggcaatacctcagattctcctggtgttgatctttcttaggggtggggaaaaaggctgaaagggcatttgcccacaacacatcttaggtaaaaggcacctttactactgaaccaaacaggaggcctagctagagaaagttctagaagcagggaaaagcacagactcttttgtgaggtctgagaaagcaaagaaattccagggtgaaagcgggggactcccctagagctgaagtactctcccatctgtttgttgctcacctacctattctttactttgtattattgggcctgggccaggacttatcctgcaagcactgagatggatgtttgttttctctgggggattagtctttttttttctttttttcttttgttttttgcttttgttttcactgggtcaaacaaacaacactttaacagctcaggattttttcattgtattgacttgtctacctgtaaacttgttaattttttactataataaaattatcatataataaatgaaaaatttcaacacagggcttgtgggcattttatttttctctacaatcccaacagatactctgcctcttaagaaaaaaagaaatcataaggaaaatatgctccttcaaaagtgaatcacaaatatgtttgccaacggaaggcaaatatttttcacctgtctcataggctggactgaaatggatttctaaaactctctaaaaccagaaaagagctgagtgtctccacccaacctccctcctttcacagattaaaaaataaaaaatggagcccaggagacatccagtatcttcccctattggtcacctgggacaaaatctggaacatgcacatgcattgcctggcaggaactcattccagtgattaaactcttcaggaggatgtttcctcttgctatttcattacctatttgtgcagtttgatagctagtaaagtgatcaaaggaactgtggggcatagattcaaaagtccttcaggaagcagaaatagaagaacagtactagaggcagcaggtccctgaccagcaggcccactacctgctgctccagcacacatcctgcacattttcagagggtgggggacagaggggccctgggtggctgttgcattgagaaatctcgccctgctcctgtatgtgcacttgaggccgagagcccttggatgcctggtgacagtggtttcctcctgcccctgccttcctctctggcagactgactggcccttctgctcctcttccccttccaggatgtcctgatatctttttaaaccaaatgccaagtttgccaaaaagtgtctgtttgtgtgtgtgtgtgtgtgtgtgttcaatgcgtgtgtttataccacacttcacaatttgtccaggcttgtattaataccatcaccaggctcaaccctggtgttaattccaagatacttaaatgcccatctaggtgaatttctcaggtaaaccatatattcaagctgtagtttaagctggctgcccgtcatagcactttgaatagactttgtttttgtttttgttttttgagacagagtctcactctgtcggccaggctggagtgcagtggcactatctcggctcactgcaacctccgcctcccgggttcaagcgattctcctgcctcagcctcctaagtagctgggattacaggtgagcgccaccccacccggctaatttttgtatttttagtagatacggggtttcaccatgttggtcagactggtctcgaactcctgacctcatgatacgcctacattggcctcccaaagtgctgggattacaggcgtgagccaccacatccggcccctgaatagacttttactcaaggttcaccatgactttcacatgttttgtattggagtaaaatgtgccagtggtgggctaaagaaaattaactcatttcaaattcaaacctggttttcttaatttttttaaaatcacagtttctgaaactgtgggctcctcatggcacattgagaggaggaggtgaaactctccaagtctgaagctcctgttataaatcttcctctggcaaagattgtgtgatcaggcttgagtacctcacagtcctagagcaggtcaaaggctggctaggaaactcatttgctccctgtacctctcccctcctttcctgcctttgctcgttctcagctcccggtggtagagtaacactggcttctgattggtgcagggtgttcaaccagagaagaaagagccctggaaaagaccgagcccctaacagaggaaacggaggatccagagcacccagaaggaatacacggtaaaaccccgataaagaatacacagcagaggcgaggaaaaggctctaagcactgcagagggccagagcaaaacatctcatggcaagggtggaaagaagcctaggaaactgactctctctgtggacaagtgttaaaccagatcccttctcagaggtccatctgcatgtgtgtggaatgaatggttcagcccagacattagcgcatatttcctggagaaagcaaataccaactatgtagtgtgcctgtgcccttgttaggcaaatcccaagtgagttgcacaaatgtgctgacttccgaggatttagcaagaacaataactttggtcactgggacttaaagcggatatgagctataaggaaagacaaaaataaatgcttctgtgtccagggggaaagagactccaggggagctgactacacttcacttacggcttacaaatctagaaggccattcattgaaaccatcagaagcctttcctgacagtggaagttacctaataatccctaaactgacgacccagatttacaagttttgttttcctggcttttgctgccctcatcttctctcttaaactagttctgtatttctcccaaggcttttcattccctaagcatacgcatttctctgtggccaaaatgctctgggtttagacaggcagcacagcccctgggctctgcctgacagggcaggagagggtctggcctttatccctccagcccaccccaggggccatttcataaaactaaagccagagacctgcagcccctcccagagttagactgcagtacaccatgcctctggcaagatcctcctcccacagtggaaagtctaagccaaatcaggaggctggggactggttccacctcagttgcaggcaaggccaggaggcacggatagaagaaacagtggactttttccccctagggaaagaaatgcttagagctacagtattaagatgacaaattaagctgtgccatatagggtgaaatgaagcagggatagatgggaggtcagggagaagtgagagcactcggtgagggtctgcactggagggggcatgggaggaagaaggaggggagtggggtttgagggatggtgatgaggaagcgtggactgccctacccacctattggaaaacctgggagttctgaggagcaagaagccttagtcaaagtcaactcaaagattcaagccaaggtgactaagagaatggcggtccagaaaaggtcatgggagaatctgaaggcagatgttgttttgggaagatgaagaacctaagccgcttccagaaattcatgaggaaatgccccgtggactgttggcaatgagggcctaggaccaaggttgagcttggggccaactctccctatagacagtgagtgcattctgacaagcatgggctctgggttcaaatcccaactctgccactcatgcctatgtgtccttaataggacgcttgatgtctctgtgtctaaggtttcctggactatggaaatgagcctaataaatgtctaccccttaggaccattgtaagagtacattgaggtaatttgtgtaaagcagtcgaagcagtgcctggcatataggaggtgctgtataaacgtttgatgctagtattactattattattctggagtcttccttgcaacggtgatagccgaagccacaggggcaggtgacgttataggcagaatacaagggcctggagacagagccctggggccatgtaattaggcattatgtttacatcatgttcattttttttcctccaagactccttctttgaacgtgagcatccagggtgggttcctggggtatgcgtgaagaatctggtaaagatttttgagccctgtggccggccagctgtggaccgtctgaacatcaccttctacgagaaccagatcaccgcattcctgggccacaatggagctgggaaaaccaccaccttgtgagtcttccagcagagaagctggctgccatgctagcctgtcatttcctggcttagtctttccctatcagcggctgtctactctttcccacaaattttagtgacaaatatttgcggccccaaaaatgtgtaaaagctttctgcagtattcaaagatcactaatatgtattctcttgatggggaggtagaatacgtttattgccccttttgtgtgccggggaagtggacattcattcagagagttgaagtgactttcctgaagccaccaagttgtcatggctcagcgggggcaaaagccaggcaccacagttgcctcttgtttctcacaccttgagtctttccccccatctcaacagtccatggtggtgatcaagtcatggccactgtcatcatgtgcatggaagctatagagtcctcctatttcctttctcttttcttttctttttttttttttttttttttgagatagtaaccattacccatgctggagggcagtggtgcgatcttggctcactgcaacctccgcctcccaggatcaagcgattctcccacctcagcctcccaagtaggtgggactacaggtgcataccaccatgcccagctaatttttgtattttttttttttttttttttttttagtacagacagggtttcaccatgttggccaggctggtctcgaactcctgacctcaggtgatctgcccgcctcagcttcccaaagtgctgggattacaggcgtgagcgaccgcaccaggccgagtcctgctattttcaaggaacattccttttcctaccaatcattaggcaggcttcaacatcagctgatgagggttagtggtcgttctggagaaagtgaaaaaagaatcagtctctagaggggcttgtggagtaaccgcctggtaacagaaggtcagggcagggaaggcaaaggggctctgcgcggatctctcagctccgcaggcgccccactctcctccaagggacccgagcgccatctgctgagaggagaacacggcccgccatggtttcccaaggagcagcagacacggacctcgcagggggcagcgaacccacgtgacacagtcttcaagtcctttggagagccccaggaaggaacaacagcgtgtacaccctgtgatggaatgttctctagggcggttcagtgtgaatggaatgtggggccggtgccattctaattggttctgtttccctctagtggttgatcgcggagatttcggcttctccatcaggacaagttcagatagcctgagatggtatcagaactcagggacagagctgggtgtggcggccctgcatccatctgctttctctccatgctaactgatatggtcagagagctggaagcaaattccaggaccccagggctccgcaaaggcaaacacattacttcatcggctgctgacatgcaacttcccccaggggttaaaacaatgtttaatactaacagtaataatatttttgagttttactttatgctggcgctgttctaatgttgtaagtgtattaactcatttaagccttacaacaacctaaggacatgggagtcatagttcccatttaaaaaaaaaaaaaaaaaaagcccaccattgctctgaggctttttatgttttggatccaaagctaatattggtggtggtaattcccatgcctggcttcgatcaattaatcagcaaatgcctaggactgcttagggttctggccttcatcaagaccttacccgggctttatgatgatgacacctggcttttcaatagccatgactgctcacccaggaggcaacgcctcgagtcatgcaccgaacaccttttattgatcctctccaacaccaggctccgtgatggctgagctggggacacctgtgactgcacgtgaacattttgaggctgggaatcccaaaggccctcggcgttggcctgggagcaccatgaaacaagtagaagcagagaaggatggcagaggtggccctctgcattagggcctggatgtatacactggtgctaagggggccccacagctaataggggtttgagtttgactgacagccccaggcaggaatctgtgagagttctcactgaacctggtgtgggggtggccctcctaaggcatgttgctaaaggccatctcttctgccactgacgcctgtgttctgcaggtccatcctgacgggtctgttgccaccaacctctgggactgtgctcgttgggggaagggacattgaaaccagcctggatgcagtccggcagagccttggcatgtgtccacagcacaacatcctgttccaccagtaagcgacacaggaactgagaccgccccatcccctctcctcacctctgcccccagcacacttctctagagcccagctcaggggtgccaggcctgggcacaggcagagatacagactcttatttggtttcccctatgtttaaagtcctttgtcctacttgcagtgagaattgtccctgagaatatgggactctgcctctgctgctcagagctgagggctcctccctcagaagggtgaggctgccttcgctctgacagagcagctgatcgatccccgagccccttgtgcagccctgaagtacttcctctctgggaccaaagacaggagaaccattgttcctttttcctgttgaagccacggcctgaaaggcaaacttttcagggggcttttcagttactttttttccccaataagatatcttttatttcttatctaagaagctacgcatagtcattgtgaaagaaaaaaaaggaagggaggaaggaagggaggaaggaaggaaggaaggaaggaaggaaagaagggagggagggaggggagaaggaagcgagggagggagggaggggagaaggaagggaacaggagggaggaaaagggaaggggaaggaggaaggaaagggaaggagggaggaagtaaatataggtaaacaaaaaattgaaaataaaagtcacctgtaatttcactactcagagataaccgctgagttataacattggtatataattttttagaactttctcctatacatgtatagatagataaacacatatacttcaaaatgataaagaatagtaaaactatgcatacaattttataacctgacttttttttcaaaaaaaaggattgcttttttaaacataagatatcaggaacatctttcatgtcattacatattcttctataaaataatatttaatgtttacagattattccattgtatgcatgaactatgtaagccatcctcttattagatatttaagcagggtctgctatttttgtattgtatcataaacaccaccacagtgagcatcttgattgccaaatcaagaatacttgtcctcaattatttctgtaagatcagctgctggaagtggaagtgctaagccactgcttttctcgttgtcccatcctcctagcctcacggtggctgagcacatgctgttctatgcccagctgaaaggaaagtcccaggaggaggcccagctggagatggaagccatgttggaggacacaggcctccaccacaagcggaatgaagaggctcaggacctatcaggtgctcagagctggatggagacagggccacagatggcaaatccatggctccccagtgcacccaggaggcaggggaggcttggagcaggagagcttctaagggtgggaacacctctgtgaagttacaccaaaaatctaagagcagcccccagatcattttccctgcagagcactgtctcacagcagcctgggttttatttgtcctgagattgatgtgcttgaacagtcttcaaagggtctgatccgaggaggtgagggttgccctttctgcatttacaaagcctgaacagtattagggctttgaacgctataaacatctaagaggcagcaccaaaccactgctgggttaaggtacccccacaatgccacttgccctgggcctttctcttcctcaccctccacagccccttaactctcccgtccttcttgtgcctccaggtggcatgcagagaaagctgtcggttgccattgcctttgtgggagatgccaaggtggtgattctggacgaacccacctctggggtggacccttactcgagacgctcaatctgggatctgctcctgaagtatcgctcaggtaacagctgctgctcagtctcctgggctgggctctcactgcagccctagctgtggtccccactctctcacctgccattttgtagctgagtacaggaaccacaatgactacactcagaagggggtttatcagtgacttggtgaatctaagttccagctaaagcctcctgaggtttttacaaatataaacagagaatcactgatgatgcaacctacttcccaaaatattttagaaaattctcttgacctgcagcccttctgtctggaataatggatgctactctaggtgaatgtcttctctgaccatggggacccaggtcacctgcaaacatacctagaagctccatagctgtcagatgaccactcaggaccagtgtgagggtgacctgctgggcattcagtgctccagagggtggccacagatggaagtggctcctctgtcatggcacctctcagacaaggggctcagatcagaagagacagcaagcagagctgagtgcccatagaggtaacagcacggttcaaccccgtggtcaagccagagctttcccccttgctctactcacacagcgttgccccgtgcctttctctgagggtttgtcatcctgaaatcctcattgctattttctttctttcttttcttttttttttttttttttttttgagacagaatctcgctctgtcgcgcaggctggagtgcagtggcgcaatctccactcactgcaagctccgcctcctgggttcgagccattctcctgcctcagcctcctgagtagctgggactacaggtgcccgccaccacgcctagctaattgtttttgtatttttagtagagacggggtttcaccgtgttagccaggatggtctcgatctcccgacctcaggtgatcctcccgccttgtcctcccaaagtgctgggattacaggcatgagccaccgtgcccggcctgctgttttctgttaatgacatctccagttagtgagagtatgcacgtgtgtgttctttatgaagagtataaatccagagcttaatgatccagaaaatgtacatatgaaactccctagatgctgaccataatacatgagcccctaatatagagatttatttgaatcagatcctatgctggatacagagacactgtgtgtggcaatgctttacagtatgtaggaagctatgaaatgttagttattattgtcctaatatgctggaatttgctgctgaattagttcccttgggtttttttttttagttaactcctgatttttgcaactatatagccaggaaattgctgtacaccctttaccaacaatgcccaacccagggcaggcctggtgattgccctggcccctaccttgcaggcagaaccatcatcatgtccactcaccacatggacgaggccgacctccttggggaccgcattgccatcattgcccagggaaggctctactgctcaggcaccccactcttcctgaagaactgctttggcacaggcttgtacttaaccttggtgcgcaagatgaaaaacatccagagccaaaggaaaggcagtgaggtaggtgtctgcccagggaaggaccctggcctgggtgagaaggagcacacagcacggggctgccactccagacatggctactcacacaggctctcgccaccagaatcagtgtctttgttctgggaccatttgcagaagatttcgatgaacacattctgaagcctcctcctacagagatgctttagccaaaatgaaacaactagctttaaatggtctgcaagtattacatgccagattacacaccagtttggtgcggtttggtgcaacatagaagtgagtgtcttattctgtaaggttaggctgttttaagagcaattggttgagcttcatttcaacattaatattccctaattaaacctgaatttcagtggtaagtgaaaactaagaagaggcctccttgggtgctataacataaaaatgatgaaggcaaaaagtaccaaccagcagagaccacttcagcacatcaggagacccagttttatgtctgtgctgcgaagtgaacaaactgtgtcatcctaggcaaattatttaattcctccttttttttagtatttttttcttcttcacatggaacatgaagctaatgacctctgcttctatttcttagggatgtgaagataagtgagataaagtattataaatgtgctctgggcttcttaagaacaggcattgctcacattcaaatggtcatgattatgatatggcagcattatttatgcctctggtttaagtgtctggctgccgctggggtttcctatgtccatccacggggagggaggcacagaatgtctcccacaggcagaacctacagctgccacataattgatgacaagccaaagggacccttggaggttctgctcctctctgtgtgtgactcacacactctctaggataaaatcaagcgactacaccctcaaaatgctcagatgaattaacagattaaacagtgaagaaaaaaatgtgttgactacacttggcagtgagaaataaataaagcgggcggtgacagcagctggcatcagggagaggctgtcatggaagggatgtgcatcttgtcagtcatcccatccatctgttgcaggggacctgcagctgctcgtctaagggtttctccaccacgtgtccagcccacgtcgatgacctaactccagaacaagtcctggatggtaaggactggacgggccatacttgggttccgtctggcagccatctcccagtattgctgggtgtgtcctgttgtgatgcattttaatgggagcaaagagaacactgggtacttctgcaggtcacacagttgttcttttgctttgagcttctttctcctcttccttcttccttcattcccaaagggattttaaaagtcatgcacctaaaggccctctccctttaatgaggaatacactctgtgctcttacccttagtaagccatcattcctggggtccccctgccctggctccaggccacattccttagtgtctggggagagcttcttctacatgtgtgccgtggcgccctctagtggaagcatggtgatgcacggctcttccagtgaattcgtggagtcagagattgcacatgtggatggcaagtctggaaatagcatacacccctgttatactcctgattctcccctcagcttcccaatttcccagtgattctccctttaattaggatgcactgaagctctcaggggtgcccccatctccaaggagctgcagtggagaggctatcccctctctatgtgagagaatgtgtgagaagcgtattcccacacaggagcaaaactaaacttacgtactgatgcaggttaatgaatggggaaagtatctgcttatcaaagaaaaggcatatttttctatttagcacaaactttttcaaatgttaagaatttactaactgaaatctggtgaagcaagagaaccgggcaatatttgcgttgtctgatcattacaactggagggaacatgctcagagaggcatcatcactgttcatgcacctgccctctctttacactgagagaccctgtgatgaacagaaaacatctttttaggatgacatctctgggtctttctcctagcctgccttgctgtgggtacctatctccctgctctctgaaccttggtcaagaagtttatatttgttttaaattgatactaatatgttaagttactgtgatttgccaaaatcagattggaaacagggcctgcatggctgaatgattcttttttttaaattactttatttctaaataaaggttttctttgtatagaatcgggatgctgtgaatggtgggaaatgcactaaatagttatgccccaaataagaaagggaaaatcatttgaatccccagttagctccttgaaagtcttttcacttaaacacacccacataccacacacacactcacagacctccctcccagatgcccaaagccctgctgacctacagagctacttctggaaaggctgacacatgcctaagacacaattcctgggaatccagcagctttgggttcaatttccttcctaaaagaacaatgaatatgacccctggagagctattagggcagagctgcttccttaacgtaaaggactctccagcctccgtatgaagtcatctcagagctaaagacaatcaagtccaacttgcagatttgacataaagcaagacttccaatccggctaggcagaaggattttggttgaaaaccatgaaatcccttcatatggatcattttttaaacaacaaaaaaagaaaagaacctactgggtgtccacaactctgagagctgctttctgaagagtcatgttttgagtcctggaatccctctccctttgacctgcctctcaagacaatgtgcgagagaactctctcttcaagtgcatgcaagtgaggttttcacagttagatttttaattttaaagtaatacacatttgtacataaaattcaattctgactgtatacatgtgtcagataaacagttgatacctgacacttgttcacagtctatgatacgcaccgcatatcctaccctctcccccagcctctctccatggcttctcaaccccccctctgcatttcctgtgacctgaggattcagttttgtttgtggaggcaggtgcaatcccaagagaaactgtgcaatcttctgagaagttagagtaggcatgtgtgtgtgatttagggaaggtacttctcactcagcttggtcaccggttccaggtttgtgtcttgggcaagtcccccatagctggtgacagaccagaaaaatgaaaacaactttgacttagccctcaagttttcagtgaatgagaatgaaaaacaaccatgagtaagagatttcttaccgagatgatgtaaaggataataatagcagccagcactcacctatgtgccaggtatttctctaactgctttgtgtagtttgactcatccagtcctcaaaaacaacaatgaagtggataccagtattttccccttttcacagatgaggaaagtctaatgtgacccacccaacataacatagtttgaggggacagagcatttcgttgaacagaggaggaactggcacaggaaagttgcatgacccccccaccaacctccgcccccaggttgcacagctagctagtcgggaggactttgcttccgtttccctctgcctctcaatgatgatctcagggccaactaagctaaaagcagacttgatggagcatcagtcctctgaaagagtcactgccgagatacaaaatacctcttcttcaaaggggaagtggagagaagtaggaaatctgggtaacctcacagtcttccagtttctggaaaacagagctggcatcagtcttttttcttgtcctaggggatgtaaatgagctgatggatgtagttctccaccatgttccagaggcaaagctggtggagtgcattggtcaagaacttatcttccttcttccaaataagaacttcaagcacagagcatatgccagccttttcagagagctggaggagacgctggctgaccttggtctcagcagttttggaatttctgacactcccctggaagaggtaaagtagagattccagctggtttctgtcaagtgccagaagtggcggttctttgaaaaagtctaacattagagcaaagttttgtaaaagcaaaaagccatcgttccccacccaagcatagcaactatctttatttttggcatagttcccccatctctgcatgcatacaaattttatgtacttgtggttactgtgtgcttacgtttttgtatttatagaagatgatgttctcagatagagtcgtaatggattttcttcccattatgaagcaatacccaacaaaacagagcttgggttagatttttctgagaataagaatgactaaacaaaattctctctttttttcttcttgacagatttttctgaaggtcacggaggattctgattcaggacctctgtttgcgggtatggtgctggagccagtggcttgttcccttccttgcctccctcccaagttccatctcgaaagtctaaggggctgggcacagtggctcatgcctgtaatcccagcaatttgggaggccaaggcagatggaccacctgagttcgagaccagcctggccaacatggtgaaaccccatctgtactaaaaatacaaaaattagctaggtgtggtggcgcgcacctgtaattccagctactcgggaggctgaggcaggagaatcacttgaacctgggaggcagaggttgcagtgagcagagattgtgccactgcactgcagcctgagcgacaagagcaaaatccatctcaaaaaaaaaaaaaagtctaaggaaaaagtcatgaaacaacaaagcaggcaaatactcctccatagtatctgactccccagtagtaggcattttgcatcctagatggctttgagtgacaaaggaataacagactgagttaggtctagatggggacactttggatgaatgaggattcttacggaggtcaggttggtagcttcatccctcagctcctcatgctgtatccccagtctctcggcctgccatgtcatcatcctcatctcctcctgtcatctccaccaggcctctgatccatctctgtctgcatgagtgacagctggcagagtccttaatgtttatcaaatacaactcagacgtcagtctcctggcccctttgagatcaacataaaatcattttgaacccttatttagtggtctatgggctttgaaaacatggggaccaaaattcctgtggattctagaagtctctcttctacatgtgtcagcctgggcaccaactagctccttccatgaacttttatcaaacccacagccacacaaagcatgtgtgagtgtagcagagtttacagcagagggtggagggtggggagatagatgtgtggaagggttacctgccacacaaacagaaaccacttctgatagaacacgaggtgtccacccacactgtaaaatcctctcctggtacaggcaaagctttgcagcgattctcctttgctgcccctgggctcctaacacctcctaaaccaccagttacctccttctttccagtgtggcatatttcagtgttttcctgttggagtgtttcctttctatgtggattctggaatcagctcttaagataacttggttttcatctttcttcataatgatcccaaacatctatctactatgcctagaactaccaatggacacatataccagcccagatatgcttcagcccatcccagtacatcgcatggtgaccaaaagatgtagtcgtcctggcacagtgggtgtggggcaggaagcagtcctctccaggggacagcagcaattcaccacagaacccaagtttctttcaagctctgctgacacagaaattgaataatctcagctcacccaatgtcaaagactcatattaaccaagaccagaatgaaaatatgctaatttatatcagaagctttgctggattcaagagttagggccttttacctgtgcagaatattccttcttgataaataggccctctcaggagaataaattacacatcagaggactgtttagtcagcataggcatagaacaggatgttccaaagatacagtcaaggggagtgggtaagagtgtagcctctggagtgaggccgaccaaatatcaaacctgagcttcataatttgcaaactaactggctttgggtaagtacatagcctctttgtacctgtttccccatctgcaaaatggagataataatagcatctacctgtagcattgttgagagaattaagtgagttaatgcttgccgacttataacacagtatacgatcactgattaagacttagcaactctaaactaaatgtttacaaaccatctcttacctcaaagcacttaacatccattgtcttatttgattatcactgtaatcttatgaagcaggcagggcaggggtctgccccatctggggggaactgagctcacagaggttggagggtttgcctaaagtcacccaggccactgggtctcactctctggtcttagctctgtaatctaggatgctcaatgccacactctcagccacttttcagatggctaagtacatttgttttgagttagctcagtctcagaggatgacattttctgatcttgtctccagtgtttaaatgaacctgtagctgtgcattggggtcacacaatgcgtggcatggagagggtctgtggctgactgccacggttactacgtgaaaccatcattacagcagttactactgttactgcctgagaacatcattacaagactgaacgaagggatcaacatggaaatgataacaaaaaaaccaaagtaactgttttaaggaaaggctagcatcgggaagaagaagagagaagaagagaagaagaaaagggctccctgcttctaatgagtaaaggcagctccctaagcttctgcagcccttcattatttattgggtaacaggaggaaggagcaggaggtaatgattgggtcagctgcttaaatgatcacgggttcatgttgttactgacagatttcaattatgcctaatcataagaaacatttgtgcagcctccaacaagggtcaatgccacttctgaaggggtgactcatagtcagtaactagaaagcagcagatagctagggacaaactggcgattctgaataggcctggaacccttagctctggccaggtcagtgggctccagtcaggatggagccttcagggagagatcaaagctcagaggtttgagatgatatcagccagcaaagaggaggggcagtagggatcctcccagagggagggccagccatagaagacatcaaatctgagcccggatcaggagaaggagcctgcagaactggggctctggcaccgagaacctgcagaacttcgcccctctgagtgcaggtgccagggctggggctgccacccagccttcgcatcccaggcctggcacgtcataggtaaatgtagttgaaaggatgactgagctgatccaattccctttacaactgtccttgtcctgggggacttgaggagggttaagaaagcagctggggaccaaccaacagtcctctaggctctccatgtccagcaatagttgttcagcaaatgagcattaatcagtgactataaactgtagcttcaacataaccgacaacttgcaatggtttctagagcatgctcccatgtgttatctcatttaaatttccaaaccaatcctgtgaaatgttctttttttttttcttttttttttttttgagatagagttttgctctgtcacccaggctggaatacagcggctcgatcatagctcactgcagccttgacctcctgggcccaaggggtcctcccacctcagcctcccaagtagctgggactacaggcacacgccaccgtgcctggctaatttcttttctagttgtttgtagagacagggtctccctatgttgtacaggctgatctgaaactcctggggtcaatcaatcctcctggcttggcctcccaaagtgctgggattacaggcatgagccaccatgccttcattttacagataagaagtctgagaaaactcagatttaggcagattgagtcacttccccaaatttatgtatcttgtaagaatccatattcaaacctcagtcccctaactcttagttcattactttttctaccacttctcagtatcctctaagaattcagaaagaaccacatcgactctgatttttcatttgtttaagtacacaggtaataggtgaatgtattttgttgtttaaaaattcatataatacacaaaaggctaaagtctcgcttcccacttcctctcccctttctacccaactctgcctccccagggagagcttctgctgacagtcggtggacattctttcagagttttacaattatgtgtgtgtgtgtacataagatgtcagtttttctttgtgtaggatacatgaacatgaattttaaacataaatgtgagtgtattacacatattgaccagcaccttagtttttttgtttgtttgtttggttttctttgtgctgtttgagaaggagtcttgctctgtcacccaggctggagtgcagtcttgcaatctcggcttacgcaacctccacctcctgggttcaagtgattctcctgcctcagcctcccgagtagttgggattacaggtgcctgccaccatgcctggctaatttttgtatttttgtagagagggggtttcactatgtaggtcaagctggtctcaaactgctgacctcaaatgatccatccacctcagcctcccaaagtgctgagatgacaggcgtgagcctccgtgcccagccagttttgtttttttattaaccaagttacgtattttaaacttctccatgtcaatgcttttagagctattttgttctctttaatgttaatagagaattttaaggcaatttcaggtgaatctatacaatttctctgtataagtaatttacactagaaatagatttttataaagatgattaagctaccagcctggtatttcattgctgacttaaatgaagaggaaaatcaatgctgtaagggaaaaaaaaaatggcattagagatccagaccttataggcattttccaaattattaattcaatctctcaaaacaggtggcgctcagcagaaaagagaaaacgtcaacccccgacacccctgcttgggtcccagagagaaggctggacagacaccccaggactccaatgtctgctccccaggggcgccggctgctcacccagagggccagcctcccccagagccagagtgcccaggcccgcagctcaacacggggacacagctggtcctccagcatgtgcaggcgctgctggtcaagagattccaacacaccatccgcagccacaaggacttcctggcgcaggtactattgtcggtcggtgtttagctgagctcagtggctcctctcccagccttcccctcctctcctgagtgttccttcaggcatgggttataactcagcaaggagcaccctctttagattctgctggttttgtttcctgctttccaaacccttatcttgattcttggtaacatgaatcttctttgtaagttggacctcccctagcaaagaaaatagaataatagtgaaaatgttaatattgtttttatttttacagtgagggataaagtcatgttttcattcatttttgcagtgaccctacatatcaaaatcattgccctcttttttcttttaatgttgtttaatttagaaaaagaagctctggtttaaagaacagtgagtcacgtgacttgctctttgaaatgccctttgaagtctggctgaacactgggctgcattcagattcttcagtggccaccagaacattctgttttcttctgcacatcttacctttgcacaccctgcttattatgttcccccagaagcccaaccctctccaccaggggctgattaggaggctgcaggataaatgtttaaaagaatgaagatgtgtgtgcacgcgcacgtgtgacatctccatgccacagtcatgtttattccacgtctattctcccacagatcgtgctcccggctacctttgtgtttttggctctgatgctttctattgttatccctccttttggcgaataccccgctttgacccttcacccctggatatatgggcagcagtacaccttcttcaggtgcgcggactcggggtcaccattctcctctgtgggtttggggcacctgggtcacatgctgcttagaagggccctgaccttcccacttcactgggaccttcaccaatgagagaggggaggggtctttgggctgcctgcagaaaggaacttaatgtatctgccactgcttggaaaggcgatcctagtggacaggcaggactgcttgggaaggccgaatggggaaaggaatgcaaagcttaggtgaatgggttgaagcgccatctttttgaggcataggtgacatgccatcagaccactgcgagtgttcaggcagcctaccgcactcccaggagagctagcgccatcccaaggcagcattcggtgcctccaatacatacctggcacacagcagctatccagtaaaggctctgagttgcatgatgttggcacgcgcctgctctgtcccagtcacatgtctcactctgtctagcatggatgaaccaggcagtgagcagttcacggtacttgcagacgtcctcctgaataagccaggctttggcaaccgctgcctgaaggaagggtggcttccgtaagtgcctacgcgcccctgtcctaagaagactagctcccctgggaggacccaacggtgggttcaagatggcaggcgttggggaggccccactcaatcctgctctgctggtcacttccatgtctctgaccagcactcccccaacctctccttccacacttgtgtgcagggacattcactacctcctaggaagcccccacaccactggacagctctatatttctcagcatagaagttctatgttgagttgacagatgattccccataacttatttgaaaggcctctgagcagggagggagggaaatagggttatgctattgtgtgattgggccttgaatggcgtgagtgacacagtggccagtactttgtgatagttgtgagtctggagaagggagttagcgaaggccattgacatccaccaggaatcctaaaagttcaatataattttaacttttctccctcagtctttttcaaagctgtcaataaggaccaaaacagactaatttcaaattcctcttctggttgctgtgtctctcaacagctagagctgctaggaataaaaagggagacaaaacgatccacaagctagagatggttattccccagccccacacctagtcagtcacaaaaccctagttttgatattgcttgagcagaaaccagcctccaagagaataagaagaaagggcctgggtctaaagaggaggaggaaagggttgggcacaatttcttatgcctagggatttgtcagcaactttgaggctgattatggaatattttcttgtcttccatgagggagtacccctgtggcaactcaacaccctggaagactccttctgtgtccccaaacatcacccagctgttccagaagcagaaatggacacaggtcaacccttcaccatcctgcaggtgcagcaccagggagaagctcaccatgctgccagagtgccccgagggtgccgggggcctcccgcccccccaggtacctgacctccaaacaacggggccccaggtctgcctgccacagagggactaggggagtccctggtatctcctgagtctctcacaaactaacatttcaaactggcagttgagtaggggactaaaccaaactccctgcaccctctgggaggggctccccacagggcgctgtggctgccaactggaggaagccactcaccaaaagcttcattttccaccagatacttcctatttgatctagtagaaaaaatgtgtttaagcactaaaaaaaattaagtcatatgtgctcattatagaaaaattagaaaacacaggtaagtcagaaggaaaaaaaatcatcgcttggatataaacacagataatgtttggtttgcagccacccaaacagattatattccaaatattgtcttaaaatctgatttactgcataatttactaggaacatgcatccatgtcaataaatagacatctgcatcacttttaatatctgtatattatcccattgtttgaatttcttttttttttttttttttttttttgagacagagtctctctctgtcacccaggttggagtgcagcggtgtgatctcggctcactgcaacctctgcctcccaggttcaattcttgtgcctcagcccccccgagtagtggggattacaggcatgcaccatcatgcccgcctaatttttttggtagttttagtacagatggggttttaccatgttggccaggctggtgttgaactcctggcctcaagtgatctacccacttctgcctaccagagtgctaggattacaagcgtcagccactgctcctggcctaaagttactttaaattaactgatctcccattattcgccacttaggttttttagttttcaccattataagcaatgctatgatgtacattcaaatggaaatgtgtttacacacttattaacagtcttaattaagaagctctccatgtgctgtgtctctaacatctgcaggtatgtacacaaatacatgcacagccagcatccatcttttgcagggacattaatgatcttggctctgagcagcaccctgtcctgggagttctaaagtccagaacagattacagtgagcatctcctgggggatttagagacatcaaagaaggctgtgtccgtggttgataatgggcctcccagctgacttgccagggctgggccttagacagccctgtccaatgatttgtcaatgaataaactgttcccaaacaggctatgcagttcagtgggaaagcacaggtatgggacacggagagccccaggtggactacttgacctctctgagccttaattttatcacctgtgaattgggaataactgcttatttcataatattattatgaggatttaatgaaatcatgtgggcaaggaattatttagaattagattcaactcaagtgatgacaaccccaaactaacagcagataaaacaagacacaacttgtttctcactcatctaaaagtctacgtgggtggtgcacgatgttctattctctttctcctccacactaaacaggcctcagcctcatcagccaataaggcaggagctgccttccaggcagcggaatggaagaaggatgaagcaaaacagagggcagagtgtgcacatgtgctatgtttagggaaggttttctgaagttcccacatagtacttccacttacaaacccaacaaaaaaggctatggctaaggcagcagggaggagcaaataatgggagcaactagattttgccacagcacctatcacagtctggtttataaatggttctaggccaagaacacccgatccctgctcttttttatattctaaagcatgtatctttatatttctcaagcaatattttctctctttgaatcacagctcatctgctgcatcatagggatcccaaaagaaggacccaaggaacttgtctcagtcctctgtgccccaagaggaagctttgcttgtttgctttgctgtcaatgctgagggctcctgtggctgcctccactcaaaaccctccagcatcaggacgtcaaggctgtgatactgtaccctgagctcttggccagggcgagggaggggaggccaagcctacctacatggtgtttcatttcctaaacgaacccttacttccacgcggtctgtccagcttagaaacttattttcagtagtgttggtccttggtccctggacaaaatgtaacagccaaagtcctagaaaaaggcaagccagttcctgccattttctttcacttctgcatttcctcactattatacgtgccttccattggagcaaaactgaatgccacgcatatgcacaggagctgtgcgcgctctgtctctctcactcactctttttctctctctctctttctctctcaatctctctgtctctatctatctcttactctttatctctcactctctcactctttctcactctttctctcaatctctttctcattctctctctatctttctctctctctctctttctcacacacacacactcacaaacccacactcttattcacatctgctcaccctagccactcaaacacaatccctcattcagcctggaataagtccagagggcgtgggcctgattcagagacaatcagttgttctcatctgggaaatggggcaatgtggtcatctctagggaccctccctgctctaacattctttgaatgtggtgggtcctgaggtggaagcactctgtccctgacttctagtatatgtggagatagggttacacaaatattttattgggcagaacttttataaaacaatttatcataagctatcgcagccagcagcaatttttccaacctggattccaccaggggagcttggccggtgtctgagtgccactttcagcttgagaagcaggtgactcagtgaaaagagcaaggaggagacagaggcagattcagttcctaggccctgggccacccacctgcaagtttgcagcccagtcagtgcaagtcagctaactgttctgaacctcagtttctctgtctgtaaattaagctaaaaattcttctttcaaagagtgtcaggatgaagtgagatcgtgtatgtagggcatttaacatagtgcccgacacacagggagcattcggtaggtgccagctctcctcctggcaggagagagagaaacaaggtgaaaagagtgaattaaagaagaggaaagtcaaatgggaaaacagggggaggagatagaaagtgtatgaaaaggaaagaatggtgcgcaataacggcggtgtaatgccaccaaaatcccctcaactacttctgggcagcacccttgacagagtgaatgcttttatgagaatgtaagcggaatgtgttcccagatttgcagtaatattgccacctggtggacaaacccatgcacctttgaattttccaaaatatttcgatgaactagcttccagtcctagatgtattttgaaagtgatttgtaaattgtaaggaactattcaaattctttcattaatgtcacaaatcaactgtgtcatctgtatgccacccactattctgggtgctggggacacaacagctcacaaatcaggcaaagtccctgctctcaccaaaatgatatcctacgggggattacagatacaaatacgtaaacagatccatcgggaggaaactctcagatggaaatgagagctatgaagataacacaacagtacatgacaatacagagtgactggaaccaggaacatttctccgaggaataaaatttgaagcgagccatgagagggtctacaggtagagttcccaggcagagtgaacagccaagcacaaagctgcaccaggagagagaggtgctcgccgagagacagggaggggagtgtggcaggtgagctcagagaggggcagggccacacacatcggccacatgggccttggtagtgagtcgagatttgatcccagggtttattggagtggataagtaagcaaggtgactgaggtgctcgggtttacatttttatagttcaagctggctgctgggtggaaaacggaagttggcagaccaaggacagaatcaggcagacccatgtggaagtttctctagtggtctaggtggtggcttgggtagcgtggcagtattggagctggagaaacgcagatggattggagatttgttttggagtgacgccattctgtcttgtcaatggattggcgaaaaaagaggcatcaaagatgagttacacatcattgaagtgagaactagggagatgccagtactttatttagtattttctcagcagctcaatccataaataatttttggaagacaacaagcagtttcacaaactacttataagtcctcaagttccaaggtaattaacgtgggtgtctcattgcctcagagaacacagcgcagcacggaaattctacaagacctgacggacaggaacatctccgacttcttggtaaaaacgtatcctgctcttataagaagcaggtaagaagaaatccttttatgctttttatcctggctccctgtagaagatattaactagggacagaagataattttctctctcaatttatgtatgatcagggcagtagatttttttcttttttatctgatttgagggccccattcaacataaaaagcaattgaggcacatacaagtaaaatgtaacttaagattaattctttttttgttgtttgtttgtttgtttttacatttagggcaagcagtcttaaattttaacccacgtattattaaaagttatatcagaagaccatagaagttattcaaaaatgcagccacatattttaactagttaaaagagagagtaaaaatttggagggaggtggaggagtataggggaaaaggtagaagaaaaagagaaaataagtaagtggcaaaaaagagaaaggaaaaagatagggtgggaaagaggcagcgggacagtgtctgagtccagcacacgccagggcgagccaggtcaactgcagctgtcatattctaactgtgaattatcatctttgatcactgccctttgagatgccaatgaacttttcaagaaatatctagttctcttggctctccagctgttcttatcagccccatccaggatggaacagctttggcagcccgtatcagaacaagcagcttgacaggggcatgccatgccaggagagaggatcctaaggaagcgtggtccagtccgcacaggctctggggctttaagataaaacctcctgtctaactttagtaggactttctgttgcttcacctgccagagccctgaacgagggataaattgacttaattaactagaacacactgcaaatggtgaaagcatttagcaaaacaaagaatgccatccaagccccaaaataaaagcagaataaatagaatgcaataaacagcaaccatcccaaactgagttctcagcagcaaatctccagtatgaaattttggattttgtgcgtgtgtgcttaaaggtggatgacaatgacagttcatgggattgagctctggggtccagagttggcatctgttcatttcccattttgtcattttacccttgattgactgaatgtcagtgccttaactttgggctgtggagtgagtcggaactcccccgaggtgtgcaggtggttgttagagtctcatttttgcagggtggaagacaggagggctgcagccttcattccacactgacatggtcattgccgtgtgttctgggtccagatcaggcatattgacctgacatatgacctgacaacaggaccactcagaaagtccagcatgcgggatatgatttggagagccagtgggggaaatcataggtcctttctctgcatgtgtattcaggcaatgtcccagggctgggcggcttccgcattgcttggatatcggaaaatgcaaaaatgcccctgaagactgagacttcagtcttcaaaatgaatgtttgggaaagaaagttaacggcactgctgtacttgtggtattcattgcattattttattttggctttcagcttaaagagcaaattctgggtcaatgaacagaggtaagaaactatttttatcagaattaaaatctcagattgattcattgttgaaataattgcacacttttaaaaggcacacctcacagccatgaggaggggctgttctgtaggtgctcaggaagtcacaagacacgtcctgaagaatatgtggctagggacatcccagactcagaagacactcagtggtgcctcttcttggaggacataagtgggggtggcattccctgatgtggcgtttcagagcattctcacccaaaaaaagcttctaaaacctccaagtatataacagtttataatactccaacaagagggccttgtagcctaaacccgggacactccttggcccattccttttaagcttcagggagtgtgggccagccccagactcaccccattcctgaggcatcctggaggttgaaatatttccagaggtttagaacctcaccaagtgggactctaggagcctgctgcctcccagcctccctcaggaactgcacctccagaacaggtgcggggctgacatgtatgtgctttcctgggcagattctagaccgtacacatgaaatctggctttcaggattgctctccagagggacctgtggggcctcggctgagacagagagtaggagtgaggcagtgattcaaggccctgagaaagagctcctcctctgcttggtataaccagctaattcattctgttctgttgactttggcttctgccctgcctttgaagggtttgaggccagggagtgatgcactcagactggtgtttccacacagtcacttcagacttccagggcagtacaggagatagatcccagggccagtgaagaagcagagcacaagtccaggcaggagaggctaagggcctccctgaacaggtgtgaggcacagaagccccgagaggtagggatgacaggatgaagatgggtcctgtgctgctagaagtacctgcaaagcacagaggtggcacagaaaaggagtccttggctgggatgggaggagatgacatgtgacatgtgaaagaggacctggagttggctcgatgctcccaaaagggaaaggtgccgaggggagctagcagccatgcaaaggcagagacatgcaggcagtctgggccatgaggagctctggaagtgactcgatatgtccagaataggccactccagggaagggctgaggaaggatgaagttggagaggggcacagaccagatgcagaagggcctcagaggccaggatgagggtttggactccttcctggaggcagcagcagtgggaaaagagttaaaagctggtttgtaaagtggagccatgttgctcgctggtccaggcaattcccccgaaagttcatgtttccctacaaaacccgagagagctactagtaggcgtgaagttcgtggccctggtctgaggatttcctgtttccttgtcaggtatggaggaatttccattggaggaaagctcccagtcgtccccatcacgggggaagcacttgttgggtttttaagcgaccttggccggatcatgaatgtgagcggggtatgtaaacagactggagatttgagtaggatttttgacttgcttaactaccatgaatgagaaactctcatgagtgataacaggaaaaaaaaattaaaaccgtcttgtttgtttgtttacatggtttttagggccctatcactagagaggcctctaaagaaatacctgatttccttaaacatctagaaactgaagacaacattaaggtacttgacctatgtataatctgctctggagctaaaaatttacctgagctggttattttatttttactttcctaccttcattaaattccatccctcctcctgctgaaatctagcaaggaatgtcttccagctaccaaacccttcctgcttctcaaatttcctttccttcactgatttctgctttaactagctgttagtgcagcgtctcagatgtcctctccaccctctaggtgtggtttaataacaaaggctggcatgccctggtcagctttctcaatgtggcccacaacgccatcttacgggccagcctgcctaaggacaggagccccgaggagtatggaatcaccgtcattagccaacccctgaacctgaccaaggagcagctctcagagattacagtgtaagccaccacagccccagcctcaccactttcttgtcaccttctccactctttgaacatcctgagaggattctcaccaccgcgaagtgctgatttggatggtaatgctgtttagtcaggcacatatgaacatccgactttcaaataagtgcctcacacttcacataccagacctcttggtcattctttctccccaacatttatgtggcaagtaagtttacatttggttccattcccttttggcttttgatagcaagttgctcctggagcttatacaattattatctttgctatgtgcaaagcagctgccaggaactggcaaagttcagtaaacctttcagctccctcggagtaattatcttagattccaggaatttcctcagaagagcatactttggagatgtcgacagagctttgctaccctcaagctgaggctcttcttgcacagtttcagccagtggagacagtggccttgtgcgttttgtagtatgttcactctatttgaggcctacatggaggaggggttggtaggagcacctttgttagtgcaaacttcagcaacgttgtggggtcctgattttactatcctagcacacgctgagtgccagtgaacatgcccagggtcatccactaaaacctgggccttggctccttggtgtcttcctctggacaccctagggccctagactgtcctctgttaattctcactcagccacactttcgtgtgtctccttccagtcatttgttctaagcttactacgtgtatggatgatatgatctgtagttttatcaaggtagtgactaccacataggatacctttgtggaaattagtaaaaatgctcttttctgcaggtggacactgtcccatgccaggggttatggcttgtacataaagttcaggctggctttagccccaacttacccctcagccagatgccttctatttgtccgaggaaagaataaatagagccaagtccctgtacaacttgcctgccctcttttcacttaaatttacatcatgaacatttccttgtgttacgatgtacttcttgaaaatgtgatttaacaagatgattattaacaaaagataaatctcacagaccgtatgtctgtcaacatagaaaattcaagagactctatagacagattattagagctaatgagagcattgcagtacataagattaatataaacatctatttctatacaccataaaaataattagagaatataataaaaagaaaggttgtctagaaatattcacatgaaatagaaaggcaacccgcaaatacccatttaaccttggtccatatggattaagacagtttagtggagtgacagcttcaaggtagagaagaggaacctggaggccacacctgggcgggtgtaaggccttcccaaagcctgactttgtatcttctcctccttctgctcttccctcttcatcgccctctccctgtgtctctggccctgctgcaggctgaccacttcagtggatgctgtggttgccatctgcgtgattttctccatgtccttcgtcccagccagctttgtcctttatttgatccaggagcgggtgaacaaatccaagcacctccagtttatcagtggagtgagccccaccacctactgggtgaccaacttcctctgggacatcgtaagtgtcagtttacagcgcctccctcccctccgtgggcccaaggtggagcttgtgtgtgctctgaaggaccagaccaagaggggaggggttctcacggtgccagggctgctgaaaggcactgggccaagggccttgtgtatctgctgtcccttgacatcttctcagaaaggcacagaactaggagcccgaagctaggaaaggctgtggggtgcagcttaacaactggtgaacgggggctctctatgtcctgcactgaggggtcttctgacccatcaaataatcactgcaccgcaggcatgagtctggccttcctggcatcagtctggcgctgagaaggtaatatgaaggggtctttcaccccaagtccccttctcaaatcctgccccaccttcaaaagggtaaaggtaaaactttccctgtggtagggtcaccagataaatacaggacacccagttaaatttaatttcagatgatgaataatttttagtataagcatatgctacttcaaatattgcacaggacatatctacactaaaaaaaaaaaaaaaaaaaaaaaaaacctggttgtttatctgaaactcaaatttcactaggcatcctagatttttatttgccaaatctggcaaccccagccagtggccaaaataataagaccttcacttattagattaaccaccgctacagggaaaaatgaagaaaaaatatttattaaatcaatagcacactaccaccttcctgacaaccaaggttggtgggggtagggaggggtcaggatagcgtaccctattacaggctgcagggtcaaaggaattggtagtaaaggcctagttataatgtaacagggatcattatgacatcaaccccaatttattctaggtgtcttgagtagtaaaatctcaacattttaagaccaacatgagcctccatttcatgtgatgataagatataccaactgatggagaccaacacaaatgaccttctcatccatggttttttaaaatgatggtgaatattggaattcctgaagatatgatttctatcttactcagcttagtaagcagctatcacttaacaatacaaaaccagagattatcagtagcaactaaattatttcctctctcttctgtctacacgaggaaacactcataaatgcacggggaggaggtcagaacctgaaagcctttctttggataagagcatcaactgcaggtaccacattggccctgtgatgctaatataaaaggagctaggcccaccggtaccgaaaagttacttagaaaagtgcggaggcttttaattttactttttttaaaagataagaaatagaatttacacacttggggctggcccacgtgtttctgtgtgtgtgtatgtgtgcacgcacgcgcgtgtgcgcttacagggatctctgagcctatggagagagatgtagctaggatagagtggacatctgaggtgggaggtgatactagctggcagtccaatgaaggggtagaagatggtaggcatcatgttagcaggctttctgatgctccagaattttaaagctggcctggaatctcacctccgcgatccatcattttggaacttaggaccaccattagccagtggcaaaaaaaaagttgaatgaaggaacaaacaattattgcttatgtaattcacttagcacatatatgatgttttaaattcttatatgtgtcatctatttttctttactttaaaattttgcaacagttacagacttatggaaaagtcacaagtacagttgaaacctttttttcttagtcatttgaaagtaacttctcagcaagatgccccttctcatttatttctctcttcctgtctctctctctcacacccctcagcacgtccgatgtatacttcctacaaacgaggatacaccccatacaaccacaacacaaactgtcaacatgaggaaaccagcactgatgtgtcatcaccacctaatcctcacaccccactcctctttcgcccattgccccagtgatgtctttcagaaaaaaggatctagctcagaatcatgcatgacatttgattgtgctgtttctttagtctcgttcagcctggaagagttccacagtcttttgttaacactcatggtcttgacactttgaggactgcaggctggttattttgcagaatgtcccttggtctgagcttgtctgaggtttcctcttgcccaggttgagggtgtgcatcttggcagcagtatcagcaaacagatgctgtgttctcactgcatcctatcaggtggcttctgatttcaatttgctctgttactgatgatgttcaattcggtcacttaagaaggtgtctgctgagcttcttcactgtaaaattactcttttcccctttataataaatacaaatttcaggtagaggcacttcaaagatatataaatatcctattcattatacaattttccatttattcatccatttatttatctctgtatgcagtcatggttcatgtgttaatcaatggactatgatccaagactatcattatttattttgatattcacattatccccactgtggtcagtggggggccgttgaagctggcttctgtatcgtcttgacttgggtcctcatgcccctggacctcctccatgctcaatggcacagcaagatattccaggctcatccttccattatccccattcctaccctctccccaagaagccctggttcctgccagtgggaagtggccctcagaagccaaggtctgagtgctagatatgttcattgcctctggagcaccattggtcccaggccttctcagtgatagaactagggaagatatggatgtacacacacaggtatgcacacacctctatctatagttctctatctacctatacagtgaacactatgagctctccaaaaccaactccacagggctcattctagttttttttctttccacatctgtaactcccttctccaacagtgagacgctggcttctctcactcccaactcatttatctaccggacctatacacctgaacagtgcccaactctgccaccatcccctccccatgtggatgccgtcctctccctgctccagctgcctctgctgcatgcaggtcctcctcgttctgctctggctctgataccctgcaccagatcagcctcctgtaaggatatctttctcatcccgttgaggcctccacaccccacggcaggttgccccctgaggaagcccgtctctggttcttgccctgctcctgatcaccatggctcctcccctaaccccactgttgccgtcccctttctgtgcccagtatagtggctgtaggactaaattgtttaaaaagggtatcattatttatttgagctttgtgaagccaagaactaggctttaagtttttctgaattctgaagacatgcttagaaagaagaatcaacaaaactttatgaccaaatagaaagagtgagagaccaggcagaattttgtaattgatcctttcaaaagatacaaactaaaggttcccttggcagggaggtagggcatggggtggggtaggaggactagtgacagcttaacatatgtttgccaaccaagaactgtttaaaaagcaagtcgaatcagaatcccagaccctacgagctggaggagcctggccccacccctcattttgcagagctggcagcaggtctgagaggttaagtgacttgctctcctcttctctttccgagatgaattattccgtgagtgctgggctggtggtgggcatcttcatcgggtttcagaagaaagcctacacttctccagaaaaccttcctgcccttgtggcactgctcctgctgtatgggtaagccgtttgggccattagctaatgcctctgaagagaagcctggtggtgggggtgggggatcatctcctgacagaaaacctgggctgtcctgtggtggtagcacccacaagtttagcttccggccccaggtagggtctgaagctgataaccagggatctgtctggcttctgattctgactccactgacagaggtatctctgaggcctggtcctgtcagtgacaatgagagaagtcccacatgatctgaatctcctactcaaactgaggccttgaccaaagcctgggggcagccattccccaacccctcacccagctctgactctcactcatctgtggccaatctgtccacctcagtgtccccatgtgaactggccaagagttaccgcccacagtagaagactccggccaaaaagctcctcctgagtcagggacagaggatgacacaggggttacatcagcagagttacagggcccagcatgcaactttctttcccacgtgtgtaaatttgaatgagtaattcatccatctcggcctcagtttcctcatctgtaaaagaaaatagtgatcctggtccttcctctgtgggccagtagagccttgccaaagcattgttctccacatctttctcttggaaatagagaatttgggaaccaacctgactataagctgtgaagatgagctcactgggctcatctgagatgacctcagctgggctttgctgacccaggctagagtgggaggtgttgcaggctggagaaccctcctatgaattgtacagggctttgtagtttacagagtatatacacagctagcagcccatttgctcctcacaaaaccccatgaagtggtcaaggcaggcatcattatctccatttaaagttgaggcacagagaccaacaaatggagtatctctctggtcccctgggactctggccagttcacacacatcacctcaggtgtaaggggagtgcattatatccagacgtattgtaggtggaatggaatgtggaactccatcactctgagttgtctcatttcacacagatgggcggtcattcccatgatgtacccagcatccttcctgtttgatgtccccagcacagcctatgtggctttatcttgtgctaatctgttcatcggcatcaacagcagtgctattaccttcatcttggaattatttgagaataaccgggtgagcataactttcttggcttttttgtttgattagtaggatagtagagtatgtgttggtcgagcagagccaggggcaagcatcgtacatgtagcagctgtatgcggatgagtgccactttcttcctccctacccccgaccctgcctcctttccttccttccttcctcccatccttccttcctctttccttcttctcctccctcctccctccttcccccgtccctccttccttcctttttcattgcttccttccttccttcgtccctccttcccttcctctttccttctgccctctctccctttttcctttcatcctccctccatccctccctccatccttccttctttcttccttctttccttcctataagcacctttttcatttctgtgctctgaatgaaatggttttctgtgtttattctgcaagcaaaacttgattcttgcaataaactttaagctttgcttactctttcagaaaggttttctcagggactttgggtgttgggttttacacacacacacatcaatacatttgggtaatttcaaaatctaaaaggaacaaaaaggcatacaatgaaaaaatctccttcctacccctgtttcccactcatgcagttctcttctccagaggcaaactcttacttgagtttcctgtgtgctctggagacacatcagcagatccctatacggtctttctcccgctttcttatggaaattgtaacactctgacatatactattccttgggcaagttaatcttgatgaagagactgggtgttctccatgctgaatgcctcacttttatgagctgccaagcccagttgtcccttccacctgacctccccctgtccagagacagatggccaaactgaatcataaaaagagggggaaaaaaagaaggcagtcgctgcagggctgtctttactccacactccacactcccagtccccaccgctgtgtctgagtcctggctgtggctgtccttggaacatttgcctcaccacgtgcctgtgtccccaggcgcctcaacctttcctctcctcattagctcttcccagttcagagggtgggaccggccagcacatctgcactgctgccctgccacacccacctccacctgcctctgggccccactggggaacacaggacaaatctgtgcggaggccccaccatgaaccgcccagacccgtggacccctgagactgactctttccagatcttgttagggtttcgtggctgctaggcaagtaacgaagcctcatctgtcccatgaatgataagaaattcagcatgtcagagtcagactctggaaaggcggggggataagaacacagccccagcagatggccagagcacccaggtgactgaaagtgctgctttgcagagctgtgtttgccacaggctcacagcccactaagtcttaagacagttttccttcagaataattaaatagccagcttaaagcaactcagaacattttcccctctgaggctgcacccatttagccaacatttgctaagcacccgccttcaaaaacctggtattttcatgtaaattatccgatacacagctgctatggaaacccccagtatcccacaggaagctccccagctcccagcagctgccggcccgtgtgagatcaggaggtctttaccagctgaacaccacgtgccgggtgtgtgctgatataaacaagcgtggcccactcgtcctgccctccagaggctcccgttccagtcggaaaaggacctgcccacgaagtttgcaacgatataagccacagtgtatgatcctccataatacagcgtgtgacagagcagcagaggagcgaggcagataacatgctgcaggccagaggcagcgggaagagccaggctgcaggggctgggggagccgtggtggaggaagttcaatttcagcctgtagatttctattagcccatttaataaataatgaagtgcctactctgagctaatcattgtgcaggtatttaggaaggacaaaaaaataattaggactcagtgcccaccctccaggggcccactgactagtagagaaagtaggcagatttttaaaaaattaatcatgggaatgtgataagtgctgggagagaggaatggatactttctcatgggaatcttggaaggcttgtaagggaaggcactctctgagccagctgtctaaagaagaacaggaatctttaagaaagcagaagggaaaagagcattctttcctgcttggagcaataggtaacagcctgcacatgcccaggcctagaggccaaagagcacagtgattccagaaagagtggggagaaagggtaggcagggaaggatgaggtaatgtgggcgcaggtgtggaggctggagagggaggaggttgtgggactgggaggagccagatggaatggacagcagtggcccagccaggagctatgctggcctcgtacgcctcgatgtcccttctattttctcaggggaggctctgcccaacatgccaagtccgaccacttgaaaacaagtccctggcttaacacagaccccagagagagtctccaaccctcctctccctagacaatggtagttgccctgtgaggggctgaaaagcagagctggagatggctcagggcctggtgttaacaaatgccttgagggctcctgttgtttcaaagtgagtctgcagggagagctccctaagtggacagcaggagggctgcagcttctctgcacattcctgctgtcacccccagagtcacctaggggaggggtaaggacagtaatgcaggttcctcacagttagcctcggtgcccacatggtactgagcatagtaaatgtttagaagatgctgcctggctagacaaaggggaagctcccgcccactagaaacttgcagggagccccagtccttgattggtcatttaattgattagctccttggcctggccttgaggcactgcttgtaagtacttcatgacctccattgcaaacccatgatgctctgctggacaaatccctccagtggccagtctggctgcaaggactctctgtctgcaggccttgccctgtgctgtcctgtgagagcatctgggccccacctgctgaagagagggggggtggggtttgccccgtttccaacagtcctacttctctgtttcagacgctgctcaggttcaacgccgtgctgaggaagctgctcattgtcttcccccacttctgcctgggccggggcctcattgaccttgcactgagccaggctgtgacagatgtctatgcccggtttggtgggtggtagccgaggcccatggagcatgggccctgggtccaaagctgggagggttaccgggggggctcctgcatcagactgtggcaggggctggtgctaggaggggaccttgttgggctggaggtgtcctgccagctggagaggattagggtgcctctgtttccatggctggggagccacaggagggatggagggcagcccttatgaggcgggtgtttggctcttgctcagttcccacataaggcctggtctagtgggccctgtgctgtggccaggtctgtggggtgagctggggcggctgaagtggactcaattcctgttgatgcccaggtgaggagcactctgcaaatccgttccactgggacctgattgggaagaacctgtttgccatggtggtggaaggggtggtgtacttcctcctgaccctgctggtccagcgccacttcttcctctcccaatggtacgtccatgccacaccctgggccagtgggcagctcagggcatccagaactggaccttatacccacatggtcatttctttcctcaggagccccactccacaatgttttttctacattctcaaagcctggcttttctccaataatacaagtagaggatcgggttaaaataggcacattcaaatatgtgaagagcatccactttaaaatatttaaaatgcagtgctattaatttcaattgctgatatttaatccttctcatttaattaccaaatgtgtattttgattagatgatagtattgcaaataacaatggttacagggtatccaaagtactaggaaatagactaatgtatttatgagagaaaggacacagcaggcccctttgctaattagagatttgggagcatgggagtaatatgggagccatgtggaggggtgcgggcagtgatcacgaccccccactcctggaggaaggtgggtagctgccaaccctgacttttgaccagggcttctcaaatgccaggttagctggcaattgccattcttccgcaggctcttcctgaagctgggtgggcccctgcctcactcccctctgcaatccagtcctacctttattgtcctcacccaggggcctgaattgccaagcagcagcccttcctagcaagctttccccaatagtgttttgtttcttaacttttcctcctctcaggctgagtgtggtcacctgtaaatagattccaaggacttggttttatgttttgatccacagggaattgatttattggaaatgaatctgcctttctactcacaggactgtgagaggtgaatgagatcacaggtgtcaacacacgcctgatgaaacaggatacacaagcagttctagttatgggagacagtgtcaggaattgttgtccttggcaccctcagcccctgcagaccctttctgcagccttggccataccttttagaggcttttgtgtgggagagagcaggtcaggaggttgactacccaaattgactcattagcttcaaactctgatgtcaacacatttgaatgagtcctgcctgctttagggcctaaagaggaccagagaagtacaccatagtccctggcttccagaaggtcagggagggtttcaaagaagaggctgtgtctttaagaatggggaagattccatttggtggggcaggaggaggagaacattgagggactggaaacacatgcggaggctgggagacgggaatgaccaataggactgggaaccagggggagatgccaattgctgacagaggagttagtgcaagaggtaagtgagaagggtaggtggggctggattgcagggctgtaactacagctgcagagggagggcttcaacctacagctgatggggaacaacagaaggttttgaggcatgaggtggcctgatgacaactctgttttggaaaggtggagttggcagggcagactggaggaagtgggaggctcggaggttagtaactaccccttactgagtgcttgctgtagaggaagcattttagtcctgacggtgatcccaggccctgagtctttactctgtgccaggcactgtgctgagttcatcttcagcacaatcctatgagacaggtattgttaccctcctcctcatcacatggttgaagtaggcaaggttcagagaggtccaatgcccaagatcacacatgaggaggccaggactggaacccaaggctgactctggacatgagcacctgacctctctacctaatgcctaatgcctctcctgctgggagccctttttagaatttaagtcttaaaggatggaagcccagaaggaagcagaagcaaggaagtggaagagaggtcccatggaaaggacagtgccaaggacactgtacagccagcccaatcctgaccccttttcttcatctaggattgccgagcccactaaggagcccattgttgatgaagatgatgatgtggctgaagaaagacaaagaattattactggtggaaataaaactgacatcttaaggctacatgaactaaccaaggtaagggaatgggtatgagtttggaggtgctggttagatccacagttggcatgatgttgccattttccttctatagaacaattgatatgcttatgcaagcaatttggttcccagttttatgtagggtcatcatccctgtgttataactcgtcttccaagagcatctaattccaatgtgtgttccctgctattcatctcgggcactgacacagggcctcagtgagaatcactccagctgagcatcattcccttttctgtgttctgtttctgcagagcatgggtcagcctcgagatgtctcagtactcaccacacctctgtgcctgcccatgtcaatatgtaacctcctagtgctggtagttttctcctaaaccatcctttgctctttgttccctcttcccctccttgctctcaccctgtctcagttctcagtccggtttcttcgtatcttgcagatttatccaggcacctccagcccagcagtggacaggctgtgtgtcggagttcgccctggagaggtgggtactctgcagaccacgtgtgaaaggcttccgaacatcagctcttgtgcctgcctctcctccccataaggcagagctattcaataggaacataatgccataatgcaagtcacatatgtaattttaaatcttccactagccacatgagaaaagtaaaaagaaaataggtaaaattaatttcattagtattttttattttactcaatataaccaaaatattatttcaaaatgtaattaatagaaaaccttattaatgaaatatttgacaatttctcgttgtttttaagtctttgaatctttacactcagggcccgtgtcaactgggacttagatgtgtttcaagtgcttagtagccacatatggctcgtggcctctgatggcagcccaggtctaaaattcctcccccagctcacacacacacttaccctggggcctgacattttagaccttcttgatctctagggccaggctagctctgtgttttctcctagtgctttggcctcctgggagtgaatggtgccggcaaaacaaccacattcaagatgctcactggggacaccacagtgacctcaggggatgccaccgtagcaggcaagaggtgagtatcctgctcctcctgtctcagggagtctctcacaggtcctgtgagaagaataggaagggtgatcatcagaccctatagtagggtggctctgaggccctgaaagatctgtacagagaaggaggcctcccagagagcatggcccaaaaagcccaacacatagacccaatggaaaagtgaactgaattgtgatagttaagagattcctctgttgggatggattcttggaaagacctgggaagcactaagtgtgtggttcttaatctcttagaggtcacggaaccttttaagcatctgatgaatatttgtagcctattcctataaaaatgcaccattgcttcccattacctccctccacacatttttacaaaacgtttcagggagtttactgagccccaggtcacatttatgatcctgcaggagctcttgaatcccaggttaagaacccctgtgatgaatgaagaatccttcctctgggttgagtttctagataggggctcatgcatgggcctttggggtagcctaacctgcattggctatttgtaggctgatatttggctttgccagaccaaggagcatagagggaaaactggcgtgtgcccttggattctggagggtgactgctgctctctgtaataaaatgtgtttaaacagactggtcccctatgggcaggacagagaggatgagctctcactcatctgcctctttcctggctgcaggaaaagcttgaacagtaaaacttcagcacacacaatagaggtgcccagaggaagcctctgccctggtttataagtggagttaggtgctgctgacatctgtccagcatctgcttgactggggcctcttcctctctcctgaaagccatcctcagcatggcccaatgcccagtgggcaggacgagtcctgagcacgcttcactggctcagacaggatgaatttgattctttggcctccatagccagccctactgggtttacagaaaagggacaggcaggggtgaagccaggtcatggctgagtccatctcaacagatccagcttcacctgcaagtgaccacgcaggtgacttcctcatggtgacaaaaggagtcatggcagggtagagatatcataccatggcaggggaaagatatcatagaattttccatgagcacatttatgagacatcaagttacaactgtgtccaagtgaggcacagtctgacatccagaaggtaaaactgagctggacgctagaaagaaactataggcttaagacacagaattgggattatatggtagggtagctcccactaatttggaaacgtaccctacttgcttccctgagtagttttaattggcccagccatgcctttggtggcttttgtcattgtggggaactgtaatggtctctctgtaccatcctatatcatccatcctttattcatagaccctaagctataagaagaaaaggatgagattagactaaatgtctatgtatagtttattttccatcttggcaatatattttttagtgggggtgaatatattagccaaagggagttggtggaacccaactcactctacccctgctccctgcaggcctctcgctgtgggtagttatctgactggctcctctttcattgctatctttgccaataaatacagatagagaagtttacttccatcgggacacatgcatcttttctagttacttcccaaatgtctgaaaattattgataaatcatgaatcattttcttaaacctgatcttccctctgtttttaaactcacatgtgaggtgatctgatccaaaatgaaagctgacttttggcgtaacagggattcaattaatcctagacatggaaacatggaagaatctgacaggattcagtttctaaccgaagggcccctgttttgattcccaaatatcccatgcatttctgaagccaaataggagaagagaagaagcagcttccttttcccgttggcagaagcttctccagccctagctctatggtcatccctccactccttgaaggatactcagtaattgctttttttcttgcagtattttaaccaatatttctgaagtccatcaaaatatgggctactgtcctcagtttgatgcaattgatgagctgctcacaggacgagaacatctttacctttatgcccggcttcgaggtgtaccagcagaagaaatcgaaaaggtgaaaaatgttttgttgtggccacataggagtctggttaattacaagcctgtttcatgagagtgcattctcttggagatgagaaactgaagcgtgctattcattcattcattccaacaaatgtttactatgtgtctactgtgtgccaagtactgttctagaaaccaggagtatagcagtgaacaagacagacaaaaaaaaatccccactctcatatctaacaaaatgttgtatgcatttatcctctgactcagcaatcacacgtctaagagtttatcctgaagatgcatctcccacagtgcaaaatgaatatgtataaggtgatccattgcatttgtaattgcaaaatgctggaagttacctaaatgtttagtcattgtagattggctgaataatttatggtacagacacacaataaagtcttacgcaactataaaaaagaagaagaaaagtctcagtaaactgatatggagatatttccagtaaatactgttaaatgataaaaagcaaagtggaaaacagaacatagagaacgctactttgtatgtaagaaagaaggaaaaacaagaaagtaaacgtatgtctgcttacctttgcaaatagaacgtagaaaggataaaccagaaaacaatgaatttggtgatcaacaagaagaaaatgggaagaaagaaaaatgggaggaaacagtacttctggggatatatttttgtatagttttaatttttggaagcatgttaatgttccacatattcaaaaaaaatcagtaagaatgggaagtaggcaaaaatgaaaacaaaaagaaaacctaacactgacagcaaactaaataaagtaacccaattttatttcaaataaatatcataatcttgcaaaagggggatagagctaacacaaacaactgctgaacacagtgtttgactctatatcctcattcttgggcagggtggagcgggggagaagaactacaaataatttctgagttctttttagtttgttttttatagtggtataggcaaagtgattctgaaaattttagatgtgttacaggattaaataaattaataaatgttttgatgttattgggacccagaattctcaccgtggaagaagggacttacaaatatggaaaagggaaaagcaagaaagaactgtgaggtcatggataggaaccggaggtagcactgggaattcaggaatatttatatgcttgtgtttgtgggtgcatgcagatgtgttcatgtttcatgcacataggcatgtatatatagacatatatttgcatgtgtgtatctgtcttccgaaaggctcaagaagcaaaaacaccccagtagccatgagcacacttagcactcaggcttttgtcttaataacattccccactaaaagtaaccctgattcctccaataaatgataagttccagggctggaatggcataggtataaaatgaacctggaatatcttatgccagaaagtaaggaagtgcttttaaaaaaaaaataaggggctgggcatggtggctcacacctgtaatcgcagcactttgggaggccaaggtaggaagatcgcttgagcccaggagttccagattagcctgtgcaacatagggagaccctgtctctacaaaaaattagcaaacaaattagctgggcctggtggtgcacgcctatagtcccagctactcaggtggctgaggtgggaggaatgcttgagcccaggaggttgaggctgcagtgagctgtgatcaagccactgctctccagcctgggaaacagagcaagactctgtctcttaaaataataataatataattttaaagaaataaaagtaactctgtacagattgcttattggttacatgggagaaacataataattttacaatggagaaattagacagcaccttaactgggtgatcaaaattaaccataaggggcagatggacatctcatgccccgagatgtgataccctgtgaaggacacaatttcacttatgtagaatccagattggagatatgtaacctgaatcttatcatgaggaaacatctgacaagctccaaagaaggaatattccttaaaaaaaaaaaaaggagactgtattcttcaaaaacataagagtcataaaagacaaagaaagagctatggaaatatctctgatcgcaggaggctaaacaggcataatgactgaatagcagacaatagactacatcttgtgcagaagagaaaaaaaatgatagaaggatattattggaccaactgacaaaactgaactatgaacagtagattaggtaaatgtatcataacattaagtttactgacattgataatgtactgtggttatgtaagagaagatctctattcttaggaaatatgccctgaagtatttaggagtgaagggctgtgatgagtaatttaccctcaaatgggtcacaaaaaattgtgtgtgagagagagaagggttttattagttaataattctatgaactatttttattcctatatgtttgtgtgagtttgaaactatttccaaataaaaagttaaaaatggagattacattctagtgggagggatagacgatctgtagataaataggtaaaatatccagtacattagagagtgaaaagtcctcagggaaaagtaacgcagggaggaactgctggggcagggtttgcattttgaggtagggtggcccagggagagcctgcagaggagagaacctgaatgaagaactagaggtgagagaaggagccacgtgcacacctagggaggaacattccaggcacgggggactagtatagaaggcagaagcatggtgagcttgtctccagtggcttccctagatcccctcctgcgcatgtgcacacacacctggtgtctctgtcatcgttccctcacagcactgtcacgatctgccagtattctgtttattttgactgccacctccccgcagtctgaggatagcagcaatggctgtgttcacattgttctccagtgcctggttcagtgcctggcgtatggtcagtgctccataggtatgtgtcggatgcacaaggctttgggtgtaaccctcttgacgggtgggatcaacaggtctgggactcaccatcttctcaaacagagccttcctcctccactgctagccatggtccaggacgctgggcgagacccactgtcttgctctttgtaaggctgaagtccatttcccaggcggctacacccaacagatgctgagcaggctgggccaccctgggatccaagacacagagagaaagagcccctgtctggcgcctgaagcacatgccagaggacaggagccagcaggagcctgtttcagcctagctggggatttcattctggaggcgtgagatctgggagcccaaggctttgaactgggggaggtttggggtgtttgcttgtcttctccaaatggcatttctttctcttccctaggttgcaaactggagtattaagagcctgggcctgactgtctacgccgactgcctggctggcacgtacagtgggggcaacaagcggaaactctccacagccatcgcactcattggctgcccaccgctggtgctgctggtaactgcgggcttgggccgcaccaagggcttaaaccaagtgctgggtctcttgggttggggaaataggttctgggtcggcagatttagaaactgcagcagtttggctttagtctggactgtttcctgtgttgctcattttgagcgatcagcccagtgtttggttcacacagctccggagaaaaacaagtcacggcacagccttgacttgggactgcgcacatcctgcgttcccaggatgtctcctgtggggccatcggctcacagccgggaagttcagcccactctgcggcctgtcggtgtctggtccccatacaggagcactgagctgggtcaaaggctcctgagctgagccaggccaggcctgaggccatgcccacgcagcccaaggatcatgagggcacaggacatagcgggaaccaaggaagtgacctgagtgacctccctgccttctgacaaatgtatttgcaggattttctttttttgaggagaattctgtcattgccttaatccactttaatcccctcgtgggctgaaatgggcccaggatggacgccacgcttctttactcttggatccacctcctgccttccctaccctacaccagggtacccctgtcttgctcaagtgaggggagtgactgtgtgcgccttctgtcagctcatcctccacaggggagccagcccagggggaagcagtaatcagaagggccagctcccagcctgtgcccccaaccttctctccaccccccaggatgagcccaccacagggatggacccccaggcacgccgcatgctgtggaacgtcatcgtgagcatcatcagagaagggagggctgtggtcctcacatcccacaggcaagagattcccagggctggggaaggtgggtgggaatcctctcctgctcacctcctctctcctgccccacagcatggaagaatgtgaggcactgtgtacccggctggccatcatggtaaagggcgcctttcgatgtatgggcaccattcagcatctcaagtccaagtaagcagatggtggggcgtgccccttgttgccttctgtggatccacctggatcctgtgttctccattgacacttggaagagtcctgctgctccgtcatcccctggggcagaggcaggtggtggctgggcctcattctccagcagcagatggagaaggccatcatgctgataagaaactcctctatattggcctaatttcctgtggtcgaagactcgcccaagtctctggatggggcatctgatcaggatgcatgcagagcctggctgggatgagggagggctgctaccactgcctcaatatttcaccacttatctcaacagatccgggacctgtggcctatttactaagagtccactccaatgtaggaatggttaggagaccaactgacttgaggacccatctttgtttttagaatattgtatgcttttgagtttgaaaaaagaccatatgttatatgacaaaccaacaatggcagtaatcttgaataggattatccttatcctgtacccacacattgtaaactattgtagataattccttattattaagagtttgcatgccaaagctaacagtttaagattatcagcatattgccgtgctcattcacgttctgatatgctttataacctagaaaagagcagagttacaattactcatttatttaacaaacacttattaagagctcagaatataagtcactaagctggttggtgggaggaacagcacataacccaccttatctatgctgaggtgcataatcctgatgcacccacaggagggtgttacacagaagatgtcatcctttcatatgtgtcagagcagataaataattgagagaaaggtctaatagattagctgcttgtggcaagtggacgtttgacccatgatttattgagcaactacaacttggacactgcatagatatctatagaaatagcagcatgtcaggtcaccagacctgtgtcagcaacttcctgtgtccaactgctggagaaagggaagtctcctattcctttccctccagctccttaatatctccatgatagagggggtgagaggggagtgttccctgtgtggagggatggtgagttttctggagctgaaaggtaaacagcctttctcctctgcatcttactgcagaggagaacagccctagactgtggaggaagctttggagtcagttatgactgacacaggataccagggcatagggtactgacacccgctagccgtgcacacactctctggtggaccatcactcatccaagagagggtaaccagccatcctgctgaaggagaaagaaagcaccaatggcccaagccctagcagctccattgtttcaggaagcttcctcagggaagtgctgccttcccgagcctttgctcccacctggcccatcagcccttaccaccactcagtatgcactggtccacgtgtctttatgggcagtcttgggatccccacactgggctaaaactacctttgacggccaggtgcagtggcttacacctgtaatcctatcactttgggaagctgaggcaggtggatcacttgaggtcaggagttcgagaccagcctggccaacacggtgaaaccctgtctctactaaaaatacaaaaattagatgggcatggtggtatgcacctgtaatcccacctactcgggaaactgaggcacaagaattgcttgaactcagaaggcagaggttgcagtgaatcgagatcacaccactgcactccagcctgggtgaaacagcaagactctgtctcaaaaaataaaataggctgggcgtggtggctcatgcctgtaatcccagcactttgggaggccaaggcgggcggatcacttgaggtcaggagtttaagaccagcctggccaacatagtgaaaccctgtctctactaaaaatacaaaaaaaaaaaaaaaaattagccgagtgtggtggcaggtgcctgtagttccagcctctcaggagactgaggcaggagaattgcttgaacccaggaggcggaggttgcagtgagccaagatcatgccactgtactccagcctgggcaacggtgagactgtctcaaataaaataaaataaaataaaataaaataaaataaaataaaataaataaaataaaataaataaaactacctttgacttcagcaagtacgattatcccacattaccatgcagacatttgatctctaaaaactggtatcaaatgatttctccagggactaccatggtttttctctcctagttttcagtatgtacacaggtctatggtatgggcctttaatccccagtatttctttttttgttgttcttgtttgggtttgtttcttgtttttcggtttttttgagacagggtctcactctgtcacccaggctggagtgcagtggcatgatcatggctcactgtagccttgacctcctatgctcaagtgatcctcccgcctcagcctcccaagtagctgggaccacaggcatgtgccaccatgccctgctaattttcgtagagacagggtctttcttgttgcccaggcttatcttacattcctgagctcaagtgatcctcccacctctacctcccaaattgctgggatttcaggtgtgagccaccaagctgagcttaatccccaaaatttctgatgagtctactccttattttgggattaccttaggcccaaccactaacagaggcctgtcctgcactgtgtgcatcccctagatttggagatggctatatcgtcacaatgaagatcaaatccccgaaggacgacctgcttcctgacctgaaccctgtggagcagttcttccaggggaacttcccaggcagtgtgcagagggagaggcactacaacatgctccagttccaggtctcctcctcctccctggcgaggatcttccagctcctcctctcccacaaggacagcctgctcatcgaggagtactcagtcacacagaccacactggaccaggcaagttggccctggggcaccgagagctgagcaaagactggtccagaacacccagtgtgggttggaattgccataagagggaggcataacattcccgatttttaacaaactcttgccctctgtttattggggtaaaagctgatatatcagaaattgttttctaacaatattttttagtcatcaggaaacttcattgattcttttttttacattttccttccctgtgatgctatggtgtgttatttcattcttgctcgtttgtggtggtggtttttccttcaaatcagctttattgatgtgtaattaacatacgatgaaacacaggttctttgggaggccaaggcaggaggatcacttgagcccaggagtttaagacaggcccatgtaacaaagtgagactttgtctctacagaaaaaaaaaaaaaaaatcagaaaattagccaggcgtggtggtgcatgcctgtggtcccatctacatgggaggttgaggaaggaagattgctggagcccaggaggtcaaggctgcaatgagctgtgttcataccactgcactctagtctgggtgacagagcaagcccctgtctcaaaaaagcaaaacaaaacaaaaacacctattttaaatgtacagtttagtgagttttgataaacgtgcattccatgtgtggtttttaaaaatgtaatcacattttttattgcggtaaaatataataacataaaattgaccatgccaaccatgtttaagtgcacagtgcagtggcactaagtacatttacattgttgtgcaaccgttaccaccatccccgatagaactctttcatcttgcttcagtgaaaatctgtgcccattaaacactaactcaccacttactgcccccctcgcccttggcaactactgttctactttctgtctctaaggctctgactactatagatacctcatataagtggaatcatacagtgtttgtccttttgtgtctggcttattatgcgaggacttagcataatgtcctcaaggttcatccgtgttgtatcatgtgccagaatttccttcctttttcaggccgaataatattcctttgtacgtatatgtgctacattttgttcatccatctattcattcattgatagacatttgggttgtttctgggttttgtgtttttatatatgtttttttaaaaataaacatctttagagacagttcagtaaagcagtggaaacagggaagtctccatttaacccctgaggatctggctcacctgcaccttctcatcagcattaagcagagggaggcacgagcaggagccacctgcacactcaatgaggagctgaacagggatcaattacctttttttttagttattaggatgctgctagctgagaatctgccttgccttgattaccccaatgtctggtgcccaagtcccttgagtcctccagcaggaactcctgtggcatcactcaggagtctagtctaagaagctagctctgaccagggcagtggtggccaggcttctgtgagtgggccagcctcccccgggtaggacacaagccataccagcagggctgtatgtgaactgtggaaaatagagagcaaagtgggtaggtgggtgtagggtgctgttttcctggaaatatctacctaatctcgctcttctcttacctctaggtgtttgtaaattttgctaaacagcagactgaaagtcatgacctccctctgcaccctcgagctgctggagccagtcgacaagcccaggtacccctgctgcttatgcagtccacagcttgaggcagttccttggctcagagcccagctggttcactgggcttgagttgctccaaggctcagatatgcctcctacagagagccccacccacaccacggtccctaccaagtccccaccacatcctcatcacatccttgctaagtccctgccactgtgtgttctgtgctgaagaacttttcattcagtagttgtaggggttcctattgtaatcaggaaaccatctggatagcatgggagagcatttttgaaaagaactttcccatgtttttgcttacagcaaaaaagcttggatttggggaataaggagcagagaaggtaatagagaatattagaatgttttgggtgcttgacatctatgtctggacatgtgtttgagtttcaagggaagggacttaactggcacatcatttcagtgtcagacacatttggttagatcaaggaatagcatctgttgtaggaagagggctctttgttctttataaaaattacaagaagatggagaaagaagcaataggaggtatgtctcctggcttgtgataactcttggaataggtgcttgtaggttcctgccctggcacagtgccccatgtaaggagcacaccacccaagaaggagagagctagagcaagtactggaggaggcaccagcatcccaatgccttggcttaagcctgggattgtagagggatgaattagccactctcttctgacttacctggagagtaaatcaaatcaaatcaagaagcaaggatatgcaaaaaccttatttccccataaagtttttattctgcccagtttctggattgcaagaaaaaccaaatacagctaatgattgaaacactgctgtctaaagcagtgcttgtgatgaattttttcccttcctcttgaccagcagagacctaatggctacttggcaaaactgactttgtcttcccaccccttacctgccagagggcccagaaatgcctaaggctcctttagttacagaaagtttgcttttactgagatcttccagccactgattcccatttatagatctggtgattgctgttgacatcagttgaaaattatttttaaaaaccacttgcagttgcaaatcctttttataactctgtaactcagaatatagaattgggtagcaaaattgtttcccagaattaccaatggtctccccacccctgcctggcatgttccctcttaaaggactaatcccaccacatcacctctgggccaggcagaacatcaggggtgctgatgttctgtgatctacagcagttaattccaaacttttctcccttattggatgagatcatttttctattgtgttttttacatttttgttcacaaagattagaaaacctgcaacacacttattggcatatttttctgataattttcatccaaaacctaattctgactttacaacatactatctttacaaaggtttgcaaaaattctttcatatagcattgtatatgtctgtcatgaaataatagtaagtatattattgtttacattataccacttcaaaataatttcctttaaagtattcttcaaacaagaaaaaggcaatttctctcaagaagttttagagagaatttacaacttgctcctaagcaaatgtgagaacttcaggaggttcatctggccattggctttacaactccaaattgtgagccaggaccacacagatatttctctagaaatcagcgtttgcttaccaagaacatttttactctccaaaggactccatcctggaaaacatgttttgggataaggtcttatgcaatcttatactctgttattaaaaccagtgagggtcaaggtgttaatagattaagtagtgacagatgatcagacaacttagaaacatcctaaataggttaataattatgtgaccatcgcatgtgcattcccaaattaggaacaactcagatcaatttctaatccttattcttacactgttccagttcccccatataactcgtatctttgtgttagtttcagaagtttctgaagtaccctcagccttgatggggatcctcgcaccacctcaaatcctgttctcagccctaagaactgtgttagtcatcctcttaagaggatgtgtgattttaaatcagataatgggataaaccacatttcgtctagactggtcaggcctttgtccagtcccctcctcgcccacactaccccagctccacagcgggcattggttcaggaattcaacccacactttataactggagacagtatctctccagttaaaaaggtcaccttggtgtccgcttctcaaggaacatggacatctttattaatcaaagcccaagctttgatctggagcctaatatcctgcactccagctctcatctctcccctcccccagtcacactttcatgcttcccagagccacccctacaggaagtggtcaagggaattctatacctcagggctgacctaaattaggatttcttggcttttaagataatggtaactttcttaagctaaaaaagccccaaaagaccctgtaagagcccttggaaacagcaccatgggtgtagcttccccccaggatgtaagcatgtatgcacacatctcgtatgtgtgtctttgtaacaaatgcctggatcttagtaccagggagacctgattcatagatttcatagagaaggagagaaagatggcccataacctgggtgatctgacagaatcacagtgccctcagctgagtgcccttcagaaattgattgacaactgtttagcttttgaaatctaaaagtagtacagcatctcagaaaaccaagatgacgcgagtccatgtgatctccttccacaggactgatctttcacaccgctcgttcctgcagccagaaaggaactctgggcagctggaggcgcaggagcctgtgcccatatggtcatccaaatggactggccagcgtaaatgaccccactgcagcagaaaacaaacacacgaggagcatgcagcgaattcagaaagaggtctttcagaaggaaaccgaaactgacttgctcacctggaacacctgatggtgaaaccaaacaaatacaaaatccttctccagaccccagaactagaaaccccgggccatcccactagcagctttggcctccatattgctctcatttcaagcagatctgcttttctgcatgtttgtctgtgtgtctgcgttgtgtgtgattttcatggaaaaataaaatgcaaatgcactcatcacaaactatcctaattcacagtctccctggtgtgcaccacctagtatagttttagacattctttagatgggtgcatagctccttgtcagtcccatgcacttctgtgagtgttactgcctcaggactgctcgttctggcaagattctgcaacactaggttggaagtgaatggactagtcttaatgttccatgtcaagtctttgtagagtttgaagaaaacacccaactagtaatgcctgtaaacattatccattgtcagctgggtattactgactttaagtttcgtgtctgtttgcccagcttatttgagtgtttacctcacaagtgtaattaggacaggagacaaagaggcatgcacaggcgagagttggtccttggttggacgtgagacccgacaggactttgtaaccatttgaagaggtcaggacctcattctcatgctgctgtgccttttctgcagtgctaccatgtgcatcttctgcagtggtgttagaagggaatgaaggccgggcgcagtagctcacgcctgtaatcccagcactttgggagcctgaggtgggcagatcacaagatcagaagatcaagaccatcctgactaacacagtgagaccccgtgtctactaaaactatgaaaaattagctgagcatggtggcacatgcctgtagtcccagctactcaggaggctgaggcaggagaatcgcttgaacccaggaggcagaggttgcagtgagctgagattgtgccactgcacaccagcctggcgacagagcaagactccatctaaaaataaataaataaataaaaaggaatgaagatggacatctagttcacataaatgctcatcaagattcagaaaataataattttaaaccaaacatttccagagactgtggatgaggagaacaagtgggtttccttgtcagggcagtctcccctccatgacctagagatgggcttcgtcgtaaacatgctttcattatactgaggatagactccagagtcggggtgaggcaagaggaaaaggggagagatgctgaggcccaggaactgttgctgagaagaggatgagaaagaaagtgagcacaaggtgctaaaatttttgtttcagctgtgcttgtttagaggcagacagagggcaagggctacacaactttaagtcctgcacacctcctggcttgccactttgcaccttctagatgctaggcaaacaactgcccatagagactataaaactactttggtaaccccgcagcttcatctggtgttgactttttcttttaagttaccaaggaccaaaactgtaagaccattttagctagggctaggatagaggttgggaaagcccagcacactgcttgcatcacactgctgcaccctggctggtttcataatttaaattagcaactgcaatatcacaggaaagaagactacactcttcggggctgcttaggaaaagaaaactaaaaaaagactatgtaggggaggtggtttagcagccattctgtttggctgtgagggtttcggaaaggcatcatgaactgggaagagtcgatgcaggtaaaatctgcacacccccttaaggaaaaatctcagtttaccttttgtctccactacacctgaggtctgtgtcttttcatcctgttttttccagctcctggcacacagaaaatgttcaactaatacccaccaaactgaaaacccagcaaactatgaaaactcagcaagaaaaatagacagaaaagaagtgggtccaagaaaatgatgcctccaaaaagcagcaaagggcaagtggagcaggaggatgccgtgctttaaaaacagccacaggccgggtgtggtggctcacgtctaatcctagcactttgggaggccgaggcgggcggattgcctgagctcaggagttcgagaccagctggccaatgtggtgaaagcccgtctctattaaaatacaaaaaaaaaaaaaagaaagaaagaaaattagccaggcgtggtggtgggtgcctgt

SEQ ID NO: 741 - DNA, 52048 bp, Homo sapiens
actccagaaggaaatttattgcactgacttaagctgatgcccaacagtcagagacaataaaaacaaaatcttgaaatcaaggaagtaggagaaaaacagtcaacagttaaccagcaaccaacttattcctatattatacttgtattttgagttggttctacacatcaggaagttgcaaataacacattttaacagctcatcttgcaatcttagcatgcaattttttgttttgttttgttttttgataggatctcactctgtcacctgggctgcagtgctatagggtaatcatggctcactgcagccttaacctcctgggctcaactgatcctcctaccccagtctcctgagtagctgggacaacaggcacacgccaccacacctggctaattttaaaattttttatagagatggggtctcccctatgttactcaggctggtctctaactcccggcctcaagcaatcctccagcctcagcctcccaaaaagctgcgattacaggcataagccactgtgtctggtccttagcatcatcttcaagaaagacttgaacatgtgctgcgcaaggtgccagggatggagtcagagtcaggagggaaggacgagtccccacggcagcagtctctgagggggtacagcaggagcacacagaagacctttctgtgaggacactgcccggggggttctcacctcagtttcaccctctgtaaacaagcatgaacacctccagcatcttcaatggattcaagggatctctacagtgccgtcacgggagcaccatagcaaaggctgctgcctgaacattagcatctctgtcacttccttctgaacggcttcaagttcctcaccacacccaagtgcttcaagccggtgggcagaggtgacaacttaagtgtctctcccatctagcagactggcctccccgctgttcccactgtgtcctttaaaccaacatccaggcatttgcccataaactcaaagtgacccccaccctgttctcctgtaaatacacacgtactcgctctgcctgactcttcattcctgcctcgggtgaccaggagatggcaggctgccctccccacccatgacgccttccctgcccagggtctgtatatgtctttgaacttgtttcccacggtggtggtgtctgaatttgcactttccatctgaagaaccaggggctgccccaggcgggattttcctcgggacgccagaaagaaggcaaaggcaagctcccagggccagggtgatggttaggcaagcgtaacctgaacatgggccacagggcatctgccaggataaacttgtttcctgtggagggaccctggtcacggatgggacaactggacattaggccttcctccaggtaaaaggggtatcagcaccttcatttctcattagggcggggttgccagctgctctggtatgggtaccccagtttcgctgggggctctcaaaacaagagcctggcatggctcctaaaacacagtaagaactcagcacgcggtatctgatattattaccaaagtattcccaacatagagcacaaacccacacattgttaaaactccccaacacagcaagggcgtgagtgtaacacccacggagcaggggcaggctgagtccccaggagagagcccagtacctttaggtcattatgcagagcgtgccccactagaattctgcccttcagcatctctgccacttccttctgaacaacttcaagctcttctcctggaaaatcaacacaaagaagcggttttttgcaacacacacatcaccatcattctgtgaggaggcagccccgctcctacccctggtcagacctaagacaaatggtcaggcctgcaatgccactacggagggtgactcgaagccaccacatccacccacccccctgggagaagtgccttgtgggcccctggcaggggtggctgcgagaaccacctctgaggagaggaataaagtgctccacacagtctgcaaagtcggctcatggctggaggagagcatatgttgagtgtaggcactgagaaacttttagagccgcctggcagcgtggttctgcctattcaacctcatgatttacttgacaatttcccaaatggaaataaaaacaaaactgcccccacaaaaatgggtagagatgtgttgccctaggccctgggctccagaggcagccttgcctgcttctggggaccaccccaccaccaaccccacttgtaccccccgaacaggggtgattagaccaagggtggcccgagccaagtgggaccagctaattttttaaaaatattttttagaaggccaggtgcagtgggtcatgcctgtaattccagcactttgggaggcggaggcaggcggatcacctgagttcgggagttcaagaccagcctgaccaatgtggagaaaccctgtctctacttaaaatacaaaattagtcgggtgtggtggcatatgcctgtaatcccagctactcgggaggctgaggcaggagaatcgcttgaacccaggaggcggaggttgcagtgagcccagattgtgccattgcacttcagcctgggcaacaagagcaaaactccatctcaaaaaaaaataataattttttttagaaatgaggtctcgctatgttgtccaggctggacttgaactcctgggttcaagcaatcctccctcctcagcctcctgagtagctgggactacaggcatgagccaccgtgcccagctactggcctggtcttgaagtcagcggacaggaggcaatgaagtgcaaggcataaatgggtgtaaagccgtctaaggatgccttttgtattttaaaacccatcgccccaaaaggagacaagacgcatcaaaaccagctgcagtgagtggtctcagacagaaaagggaacaaaagggagaaaacgaatccagttactactttcccttctaagttcctgagctgtggatgacataccctgcttgaggttctcaggccgaatcccactgaccgctgtcctatagtccgtcacgggctcggttggtttgacgtacttgtcataaacgcacttcccatactggttcacgatggacacacgggcggccatgctctcctcccccttagggcccacgcccaccatctcacagtccaaggctaaggctcttgtcaggctgaagggtaaccaaaggctgtagtttaataaacacggcaggccacagggctccaggtcagagccccagggatccatggactaagtgtcagcagagaaaagctctctgcccctcactcatttgcacccacgtgacaagctctgtgtggtcctggttcttagcaggaccctgggaggtgcttgcctcattcacctcagggagaggaaagcatcctcttccttgaagaagccccgccctccacggctaagcatccccagcagaccccactccctgagaccagcgtacccgccgaaggcctgctctttcacgaggctgaggctgacgctgccctcgctctgacccaactgtttcctcgctatcttggccgcctctggacctatggcagcttcgatatccgctgggtccacgtcgtcaaaccagatgtcttccctaaaaggcaaagataacaggctgatcaccagaagaccctagtgcaactggtggggtggggctgtggggctgactgtgcaggtgagtggagcgatggcacagcctgcctctcccacaggctggccccagacaccccgactgctggccctgctgcttctgctattttgatcatcttggcattttccttttttttttgagatggagtctcactgggtcacccaacctggagtgcagtggcatgatcttggctcactgcaacctttgcctcccaggttcaagtgattctcttgtctcagcctccctagtagctgggattttacaggcgcccactgccacgcctggctaattttttgtattttcagtagatacggggtttcgtcatgttggccaggctggtcttgaactcctgacctcaagtgatccacctgcctcggcctcccaaagagctgggattacaggtgtgagtcacagcacctggcctcatctcttttctttttaattagaaaatacactcattattcaagatttaggaacacagacaaacacaaagaatataaaacagaaacacataacccaccacccaagtgtaatgagtgctaacattttaattatgaaggtaacacgttcattattgaacacttaggaaacagacagacagaatgcctgtaagatggaaacacagaaccccttgccctccgtactaggaagctcacacaggcacgtaacacctgcctggggaatctgtctcttgggctaaggttaaatgtcatttccttagaaaagccattcctggccccactgaatggacacgtccctcttgttccaggcgcccaataccttctcctcactagatttatcctgaccacacttaatcaacagctgcagtttacagtctgtctactgcacttgacaataagcctcaagagggaggagcaggcccacctcactgaactctatcccagacagcctgcctagcacaacacagggaggcccccaaatggctcattcctcagccatcagcgactgtgtcctgaacacccaggcaacatgaagccagctgtaacttatgaacacgtcacctccagctgaaccattcagagaaggccactgactcccggtccaccccacgtgggtggccagcacagggtttattcttttcacttgtttttttgagagtcttgctccgtcacccaggctggaggcagtagtgcaatcacagctcactgcagcctcaacctcctgggatcaagtgatcctcccaccttggcctcccaaggagctgggatcacaggcaacagccaccacacctggctccatcacagggttgaagtaatcaccaggcactgagccaagagtgccaacctcacaatctccttatgatgccaccatgactaccacaaggcacagaggacgtcagaaacttgccccaaaccacccaactggcgagaagcagggacaggcctcatacttgggtctttctggcttcagcacgctttccttccacacacgtgtactggcacccactaaatgctgagctctgctcaacgctcggaagaagcaggccctgccttatcatgcgcacactctaggggaaaacaagtaacagcgagtaaacaaaggaacagacgacatcagggtaaagtgatggagagactgcggtgaggccaccagcctccataaggagacaggccttggtgaagtcgctgtgcctcggttctcagtggtgaggtggcccatacttactcggtgggtggggctggggctgcctccttagctttccgcttcttatgctcgatgtcccctcgttctggaacaatatcaccatttgtcctttccttggttcctttcttattgtgctctgttccactggccttggtgcgaggtactggcgccctcctgtccatcttggaacctgaaggaacagagcccctgctggcctcctggtcttttcctgccggcatctcctctcccttcacttgaggcgaggtctcttttttgttttgctggataattttgggcttctttttggaacccatctgagagatgacaagaggcttttctggggcctgagatttttgtttcagcagccactgggacccaaaataaaatacatgctgcatttgaatttggaaattacacacagcagattgaaaaaacttacgtgtgtatgtatatacacacatatacaccaaacacatctatacaattcccatccgcatcactgaaattcattttcaaacggtttggaaaaagctctttttcattctcatgggtcacttgtggtgaaatgctgtttctttgcttatcttattataatgcattttgcacctgctccttcatgcatacaaaatgtcaaactcattctacaccttgggtacctgttgagtggctggacaccacagaccacttcccttttcagcttatctagaaagaattttggagttaacttccctcacagcttgggccaacatcctgctacacagaaatcgctttttttttttttacaagattccctggtttgctactgctgtgaagatctcaggaaggtggggggtgtcataaatgaaaagaaaagcttctgtcaaactggagtggctgaagaactgctagcagccacacaccttggctgtcacccaagcagaggctcctgtagtcttagagcccagcttcctccctgtgttcaaatccccagtgggagtgggcgccaccacagtgcgatgatgaggcgggtgctacttacctgttctgtgataggtaaagaactgaagggctgactttcttggatgaattagaaaacactccaaagtttccctatagcacacatcccttccattcacttattttgcttttctttcttgggagaaggaagaagagttggtgttcaagaaatcccacagaaccctggggctgcccacgggaatttgactggtcctgtgtgttaagacaggaatgtctgcactgagatactgtgcagagtattaggaggttcaagaagcgctcggggaggctgaggtgggaggattgcttgaggtcaggagttgaagaccagcctgggcaacaaagtgaaaccccatctgtattagttcattgtgcactgctataaaggaatacctgtgtttggtaatttataaagaaaaaacgtttatgtagctcatggttttgcaggttgtacaagaagcatggtgccagcatctgcttctggtgaggccgaaggaagcttcccatcatggtgtaaggtgaagggggagcaggtgtgttgcgtggtgagagagcaagcaaaaaaggtgctaggctctttttaaacaaccagctctcaaatgaaccagcagagtgagaacttactcgttactgaggggagggcaccaagtcattcatgagggatctacccccatgacccaatacctcctatgggccccatctccaccactggggatcacatttcttttttaaaaaaactactttttacttttatttagagatggaatctcaccatgttgcccaggctggacttgaactcctgagctcaagtgatcctcctgcctgggcctcccaaagtgctgggattacacgtgtgggctactcgggaggctgaggcaggagaatcactggagcccaggcagcagtgagctatgatcctaacaggaggtagctccaagggagctccaagggatgtggtaagaatgtatgagtgacgcacgtggaagagtgtctaggagagagcaggcaacctctacagaagtgcaggtcactagggagacagcaggtacaacacagccttaaaagcatggactccagagtcagccacctggttcccagccgcaatcttagatgatctatttaaacttttccagcctatttcctcatctgtacaatagcgatgatggaagtgtccacctcacagtcttattgtggggattgcaacacgcatggcatagagcacatggcagagtgcacatttttaggagctcaattagtatttacttcaagaccgtaagtgtcgctagaaccccatcacatgtctgctatctgcttttcacttctacacaggaatcttctttctccctgtcttgctacacagaccagtgtgttctttcgttgttgttgtttgagatggagtctcgctctgtcgcccaggctggagtgcagtggcgcgatttcggcttactactgcctctgcctcccgggttcaagcgattcttctgcctcaggctccccgagtagctgcgactaccggcgcgcgccatcacgcccggctaatattttttgtacttttttagtagacacggggtttcaccatgttggccgggctggtcttgaactcttgacctcaggggatctgcccgcctcggcctcccaaagtgctgggatcacaggcgtgaggccccgcgcccggcctggtttcgggattttaagctaaatttctctttgtaaaatccattctagttagttcattatgcaaaaggtacaagggtttatctttgcttttttgtacttgaaataattctttcatcaatttctttcaagcaaacaagttcgagacctccctcaacaggccacctttcttgtgaaaagctgtttacaagatttcgattcaaatctgcctttacaggtcttttggggctacccaagtctttccctccgtcgcgttctgcgggaatgagctgcgcagcgctccgcccgggccccctcaagcctcacctcttgcagcgccttccagttttgagaaaagtcttctggtgcctttggaggtcgcaccacagcaccggggccgcttgctggcttcttgcttacttcccgcgccttgcttttccaaaacctttttttcttcttgtttttcttccgagtgagcgtcttgacaggacccggcttagccacggggctgctcggggcgcgcttggaggcggggaccttcgccttccccatcctgctgccgtccagcgcctgggccggcggccacccgagaccccggcctccccgggcccggcgccctggcagcacaagcgcctgcccaggccaggccgaaacacacccaccgcagggaccccgtccaggaaaagactccggaagagaccccgcacgcgttgcgcatacctcagcacgcacgctccagtccccggaagcgctcgtctctccacaaccggctggaaaccggatccctgcctctggttccgcgcagcctgggcggttcacccgcacgggacttgggccgccgccttagccagcggcatccggggtcatcgacctcgagtttgactggggcaagccgaggacctccccaagatccgggatggggatgagagatgcgaacgccggaagggaactggggggccgctgtgtgtgtagcacctggtagggcagctgagctgggggcactgggcggtggggctagtgagagccgggctaggtcgctcgcctgcgtcctggactctcgagcctttcccgccttgggctgctccttgctcagcctcacagcggctcatcttccacgtacagtggggaaactgaggcccaggcaccgggaggagttcctgccagttcactctgtagcaggacgagccgcagacaagaacccctcagacaccgaattgtagaaggaaagggctttatttagtggggagcatcggcagactcacgtctccaaaaaccgagctctctgagtgagcaattcctgtcccttttaagggcttacaaccctaagggggtctgtgtgagagggtcgtgatcgattgagcaagcagggggtacgtgactgggggctgcatgcaccggtaatcagaacgcaacagaacaggacagggattttcacaatgcttttccatacaatgtctgaaatctatagataacataaccggttaggtcaaggattgatctttaaccaggcccagggcgcggcgccgggctgtctgcctgtggattttatttctgccttttagtttttacttctttatttggaagcagaaattgggcataagacaatatgaggggtggtctcctcccttacttctgccgcctgggttcaagcgattctcctgcctcagcctcctgagtagctgggactataggtgcacgccaccactctctgccaatttttgtatttttagtagacctggggtttcgccacgttggccaggctgtcttgaactcctgacctccagtgatccatccgcctcggcctcccaaagcgctgggattacaggtgtgagccaccgtgcccggccgggagtgggtagatttgatgtgcgtgtgtaacaggcagaggttgatggagtaacagggaagtgaggctcctaggattttggtctgagcaattgggtgtggccatttatcatctcaataaatgtctgcggggagcagggtgaagtatgggggtggagccatgagctccttttcacacttgctgagtttgaacgggccgtcagtcaccaaggagagacgtctaatcagcagcaggatataagattcctaagcttagggaagggtcagtgctggagatgtaatttggaaatcgtcagcacataattagtgttgaaacatgaacctgggttagttcatccaaagagagagtaccaatatagggagtgaagggttaagaccagatagcaggtgctgggggctctccaggggcgaagcagcagaggaggctgagggggagcagtcagtgcagtgggaggagaagcggatgtgagtggcatcagagaatccagggggagaataaaccacatcagatgctgctgagaggctgagaaggacgaggacagagagatgggaaccagatatggcactgagattgtcagcaagtccaccgaaaagggttttctttttttttgtttgttttgagacggagtcttgctctgctgcccaggctggagtgcagtggcgtgatatcggctcaccacaatctccacctcccgggttcaagcgattctcctgcctcagcctcctgggtagctggaactacaggtgcacgccaccatgcccagctaattttttttttttttttgagacgaagttatgctcttgtcgcccaggctggagtgcaatggcgcaatctcggctcaccgcaacctccacctcccgggttcaagtgattcttctgcctcagcctcccgagtagctgggattacaggcatgtgccaccacgcccggctaattttgtacttttagtagagatggggtttctccatgttggccaggctggtatggatctccagacatcaggtgatcctctcgcctcagcctcccaaagtgttgggattacaggcgtgagccaccgcacctagcctaatttttgtatttttgaaaagagacggggtttcactatgctggccaggctgatctcgaactcctgacctcatgatccgcgtgcctcgtgatccacctgcctcggcctcccaaagtgctgggattaaaggcgtgagccaccacacctggcccaggttttctttttaaaaaaggaaaaaaactttgttccagcagtttgtaaaccagggcaatgcagccttctgtacaaaggtgcattccagggaacaaagagaacaaagaaagaggtcgtcttttgtagagaacttcctgcccaggttcccactttggtccacttatgcaaatgaggaaggcacacttgcttagttctgattggttaatacttgctgagttcagattggtcgatgcaggtcacagtcgatgggttgattctggcggcataaacaggaacagatagctgtgaaaccatcccagagttaagtgagagtgggggctttccaggaacgcagaatgtgtgtgtgaccctagtcagcaaatggctgctaggtcctactttgaatttaggcccagttagtaacttgggatccatcaagaaggattggctctttcagggttcacaaagttattggtgaccttttaaagatcaatttcaatggtatgtgggaattgaaggcaaggaagtggagatagccactgaaaataatgtttctaagttcttaaagacagccagaaacagggctatggcaggaggacagtgtgggtcaagggaaggttgttgattgtaatcaagagacaccagagtgtctgggcttggtggctcatgcctgtaatcccagcactttgggaggccgaggcagtcagctcacctgaggtcaggagtttgagaccagcttggccaacatggcgaaaccccacctctactaaaaatacaaaaactagccaggcgtgatggcgggtgcctgtaatcccagccacaagggaggctgaggcaggagaatcacttgaacctgggtggcggaggttgcagtgagccgagatcgtgccactgcactccagcctgggtgacacagcaagactctgtctcaaaaaacaaacaaaaaccaaaaagagacaggagagtcattcatgctgatggagtgagccaggtaccaggatctcgatatctaagcatgcccccttctccaacagcctccttaccttcctgcatgaaagcacacccttccctccagtcccccattcctttattctgctgtatttttctccataacacttaccacctttgaacatactacatatacaacatgtgtctgtctagcaactttgctgtctggctctcttccctagaatttaagctgtgagaggccgaggctgctgtctgcctggcttggggctgctttcctggtgtctagcacagagcctggcctgtttcaggggctcagtgaaacatttgttggctgaaggaatgaatgaatggctctagcagaggggcagaaactaacgatgcaggaggagagagctgggaagggatccagagccagggcctggcaggaagtgtaggtgtgtcctccctgatcgcagaggaggagagaggctgcactttgaggggtggaaagacaaggtgaatccccctgctggtcatcagcttgtgcggctctgtgggtgtaaaagagtggtttggagcatgtgaagtgagtcttccaggagatgaaggggattgccaggccgtttgtgatgatgctgagatctggtgccgtgcagcctgcttctgcgactctcctcatcaggcgcaggcacagagtaggtggagagttgagccagaaccacgatgtctttggcacagcctctcatctgtcagatgggagcggggaccccggagagggagtcagccgaggtcctggcattccttgtgaacccccgtctgtgggtttctggtccagtgtcccttctccagattagatggcttaggcctcctctaagggggtgggcgtgcacatccggagagctgtctggtgtgcaggactgggctgcaggttaccctgaactgcaaccatcttagagcaaggcccagcttgcagcaggaggagctgcaggccgcccaccctagccacggcccctgccctggcaggaagcttccaagagtaaacactgcctaatcgtcccgcccagtagtgagcaggcctgtcccattccatactgaccagattcccagtcaccaaggccccctctcactccgctccactcctcgggctggctctcctgaggatgcaccagcgtcacccccgggcaagatgccctcccctctgtgtggccggaatccttgcctgtggctttctcctgggctgctggggaccctcccatttccagcaggtgggctcatttgcaggagcgggggtattctgggagcctctgggtggggtattctgagctacctggggcgaggggagtgccaaatagctgactacatcagctttggggtttgcgctgggcaggggagtctgtacttggggctttgggggatgaagtgtgctcactgaagagggagttggtgtctcagtacgacctgctcattcggtgaagctgaacagacagatactagtttgtcccaaactgtgtaggttgctcttctctgcctctcccttcctctccctgtctctgatttccccctctccttcttggttggcctcacccacctcctgcctcctgtctccctcttcatccatctctttttgttcttttttctttctctctctctctttttttttttttttttttttttaagacatggggtcttgttatgttgccccagctggtctcaaactcctggactcaagtgatcctcccacctcggtctccccaagtgttaggattacaggccagagccactatgcccggccccatccatctctttttgtcttgcagagttgtcttcaggctttggagccacaggccgtgtcttcttacttgagccctggtgctcccttaaaaggtacttgtcctggtgtcttctctcccggggggagtttctcaggactttcaaggggtatctcaccactgagtcagtggtctgggatttttggtggatctggaaggagaaggtcagagaagctgctgtcaaccctgttaattaactctgttacttcctgccaagttgatataagctggtctgggtgttccagccaggccagggttctcaccctagcttctgttaaatatcacaagggaacggtcaccgattggctggcccctcctgccccatggcctctgctgagctggctgattttcaggagctcttgtggtttctgaccgtggatgtaaatatttattccttctgtgggaaacaagataggtactggctcaggctacctcctaaggccatggatttccttatgataaaggcctgtccccattgcccacaggcccatgtctgtgaccttctccggtgcgagcccccttcccagtagggccattggcaacttgactaatggctgatgggggccagaggcaggtgggctagtggtcaggggcaacaggagggcaaggcccactttgtgacctggttctttgtggtctaggccagaggcacactgaccagtgcctggggccacgctgggggctggatgcagccgacgctgtctgggtatcccatagcctgggtccttccagcgctgccgctcctgaaaggctgggagatcattgcccagggtccctgaccctctaagggctcccttgggagaggacagtgagggctggcctgggcccctgcttcccaagagaccactgggctccactcgtgttcagtttcctgtcggggtccatgatgttacttgtgaaacacctgtgcccagagcagggtccaggaggcagggcaggggctttcccctttgggcagagccaccagggcagtgggaatcttgtcttgatggggtgacccaaagcacacaatagcccaacagctcctcctgggccctgccctttgcgtgcctagtcactaatggggtctggctcttggggtgggggtgacacgcaatgtcttgacttcggaaggccatccttccaagacctgccagcccctttcctgttagctttccactgcttgctctctagaaccatcgccctctgctctccctctccccctccaggccgccctccttcccctggcttccagaggcagaggcagaggcagaggcgggctgcaggcggcatcctacacctggagctgctggtggccgtgggccccgatgtcttccaggctcaccaggaggacacagagcgctatgtgctcaccaacctcaacatcgtgagtgccccacgctggactgtgcaggtccccacggccagggctggtgaccaatgtctgtgggctggtgtatctggtagtctgaatacagtgggttaaactcaggtagaatggctcggggttcttcctcttctccctccctcccctgggtggaggtgggtgaggtcccacaccctctctaggctccatggcacatgcacaccctgcagcctctcactactcaagtcccttcacctggggccaccctcaagcctggcctcttccccagtatccatttgacccccacaaagctcagctaaagcaaccctggcaaatgggatacgggctgctcacactgccctctgcaccccgaccctgccctctctccattctcttgtcccccgctcagagtggcgaggacaggtcacccgtctgaagtctaaacagagactgctggcaaaggagatgcccaccttcatttcttgctagcacctgaatccctgcagccccccttcacttgaaagctggggaagggcgggcagggaagcactcccccactagccgccgtctcagaaagacaaacaaggccaggcgcggtggctcatgcctataatcccagcactttgggaggccaaggcgggtggatcacccgaagtcaggagttcaagaccagcctggccaacatggtgaaaccccgtagctactaaaaatacaaaacttagctgggcatggtggcaggcgcctgtaatctgagaggagcctgcgatctgagaggagcagcgtttgaccggaatatccgactcgtgaccatctgtgtgctctcatccccttgctttggagtttgttttccttgcgttagttggccttcctgagccatgagctgaggagcaacagaggcacggctgactgtgcagcacattttaggagccccccgccccgcccggttcccacacatgctggtggagtagcctctccagctcttcacactccgggggcccctgggagtcagcagctgcctggggctggcaatgcccacccgacgggttacctctctcatctgcccttgcacagggggcagaactgcttcgggacccgtccctgggggctcagtttcgggtgcacctggtgaagatggtcattctgacagagcctgaggtaggcatggagctggaactcagcacaccatacagagcgggaagcccaagtcatcgcatctccatcctctttaacctcttgtcccggatgccccaagcagcatggatcacagaatgcattcagccagacagaccagctgccctcccagctctacccagcactcagcacaggctgcctgactacttctctgagcctcagttgtctcatccctaacacgggctagtcatagggttgttaggaggactaactgggaaacaaaccgaccgcagtcagcaccgtgcctggttggggtgtcctaaatgcaggctttgctgtgggtccgcagggtgctccaaatatcacagccaacctcacctcgtccctgctgagcgtctgtgggtggagccagaccatcaaccctgaggacgacacggatcctggccatgctgacctggtcctctatatcactaggtagccgagctttctgatgggtgctggccagccagcctgggaaggctgctccctcagcctcctgccctctgcaaaggtgaccccagggcaggcacgtgccttggcaccacccaagtgactgttttctctcaccgaggtttgacctggagttgcctgatggtaaccggcaggtgcggggcgtcacccagctgggcggtgcctgctccccaacctggagctgcctcattaccgaggacactggcttcgacctgggagtcaccattgcccatgagattgggcacaggtatgtagccccaccagctgtccccaggatctggcaaggagctgacctgggtacccagggtggaggtggtcttggcaagcagtgggtccttgtagagtttctccagaggagcctgtacccctcaccccgacagactcaggtgtgaggacaggggaacctgatactgtttgattaaaagaactttttttccaaaagacgagcaagacacctttagcaggtagaaaataacttctgtagaaaattcaggtaaagaaagagcaggctgtaaaaattatctcaaatcccaccatttagagataatgtctcttcacattttgtatttaatttcagtcttttctttacatacacacacatatttcttatttgcaaaattgggatttagtttggatccctgaaaaaaaggaaaattgtgattatgctgtgcattgctttgttacctgctatttctttttcttttcttttcttttttttttttgagatgaagtttcgctcttgttgcccaggctggagggcaatgacgtgatctcagctcattgcaacctccacctcctgggtgcaagtgattctcccacctcagcctcccaagtagctgggattacaggcatgtgccaccacgcccagctaattttgtatttttagtagagacagggtttctccatgttggtcaggctggtctcgaactcccaacctcaggtgatccacctgcctcggtctcccacagtgctgggattacaggcgtgagccactgcatccagcctttcttttttcttcctagggtaagtgcaggatttacctgttctttatgtaataatatatcccaaacattatcccaggtatcttagaggtgtgcaccgtaatttatttaatcagtcccctcttcttggatgtctaggttgtctgaacacgtcttcctgttgtgaatgttatgcattcttgtgggcaaaccttcactcttacctataaccatttacctagagtgatgggtttcttttcatttctttagttttttaagtatgaaaataatacccaattgttgtaaaaattcaaacagtgcagagatttctaaagtaaaaagtgaatttccacattccttgcccaccaacccccacccgacccctttcaacccctctgagcctgggagggttgaggcagggttcctgggtgtgggacaaggcagggctccttctccctcagagggagcatagttcccttctgctcctgtgatgcagaagacgtgagcccccaaactggggcttagcctgggagggttcttggcttcaccgaggaaagaattcaagagggagcaggtggtgttagacagcaactttgattgatgtggcagtgggcagagtgtacagccctgtgactgtatacagcacagcatagccccttttgaagccaggctaccccatagacactgtgcccaaaagagcagctcaaaggcagggctgcagtcctagttaatacccacttctaattatatgcaaattaaggggccagattatgcagaaatttctagaaaaagggcagtaacttctaggttttcgtcatggaaaaggggcagtaacttctgggttttgccatggcaatggcaaactggtatggcacactggtgggcgtgtcttatggaaaggggcttcccacccctccctgttttagctagtcctctggtccagtgtccaagcggggcctccagagtggagtccacctcctacctcaccggtgcctggcctctcccaccccattaggagtcctccatcagttccgctttgggtaaagcaagctctgttgtgacagtttggaaacggttcaccttcctggcctaggaatgcaaacaatggccaagggcaagcacgttttaactgaactttaaaatcgtgctttcctcacagtaggtgaatttcacgctcaacacatccatgtaaacagtccccagagcagcccttcaaggccccggccagtccccacctccccacagactcctaacaccatgatttaatgtggcttgcacatttttaaaggcttttgatatttattagcaaaagatgcgagagccaccctgctgggctagcgctcccttctgggggaaactgaggcagggcgcacgcgaccctctccactgcgcccagttagcagatggcggcgtcaggggtcgacccgggtcggaaaactcgctggcgctgcggcactagggcgccgggccgctgactcgccgacccccgtcccgcccccacccccgcccccgcccctgccggccgccttagcgcaactccccgccccccgaccagcttcggcctggagcacgacggcgcgcccggcagcggctgcggccccagcggacacgtgatggcttcggacggcgccgcgccccgcgccggcctcgcctggtccccctgcagccgccggcagctgctgagcctgctcaggtagcggccgccccgtgggaggggcgcgcgagcctccagccagcccgctgggccgccagcgccacctctctctacgtccgtccccactccgcattcagccctccttcctgtcccacccctccgtccaacccacccctccgtccaaccccgcgcccaccgctccgtccgtggaggggcgggcgcgcgagcctccagccagcccgctgggccgcccgcgccacccctccctacgtccgtccccacctctccctacgtccgtccccactccgcattcagccctccttcctgtcctacctctccatcctgacccactcctccgtccaaccccgcgcccacagctccgtcccatcccgctgcgcccactcctgcgcccacccctccgtcccaacccctgcacccacccccccgtcccacccacctgccccaccccctgcacctccccccgtgctgtcccactctgcggccacccttctgtccaacccctgcgcccaccgctccgttccaccccctccctgcgcccacccctgcgtcctccctcgcccccttgcgcccacactttcgttccagccaatctgggcacgcacccctccgtccatccccatcccgccccttgactccacatacactccctggttctctcccacttgcctacacccacccctgcatcctaccctcctccatccacccctccatctcagccccctgcacccaccccgttcctgggcccaccctgttcctgcacccaccccctcacttcacccccttacccttcgtctgcctccacccgcccctacccctccgtccactctccacgctccatcagtcccacacccctatctcccccacccgcgtacatgtatccctgcgtccccttcccgccgaccgcaccgctcccgggcctaacctgcatctgctccatcccactcagacccgtccctccgtcgccgctccctctgctggccacccacctctgcgccggcaggagccttagtcttggtcccagccaagagccggctcctggtggggggcgcgggccgagaactcctgttcccactcacaaaaggccacgcttccaaacgcttccatcctcgtgcccactcctccgtcccgcctcctcccggtgtacaccccgggactgagccgggcctgagccgggccttgtcgcagcgcaggacgggcgcgctgcgtgtgggacccgccgcggcctcaacccgggtccgcggggcacccgccggatgcgcagcctggcctctactacagcgccaacgagcagtgccgcgtggccttcggccccaaggctgtcgcctgcaccttcgccagggagcacctggtgagtctgccggcggtggcctgggattggctgtgaggtccctccgcatcacccagctcacgtcccccaaaacgtgcatggtgagaacctgctgggtgccgtgctaggctgaggtactaagccagggcggcttagtttaatgctgtctgtgccctctagaaattatttaaaatgtttgaacaaaagctccaacatttttgtttgactgggccccacaaattatgtagctagtcctgggagggcccctgtgcccaaggactcctggctgagtgaggacaccaatcttaaacagttaccaaggacttccccatctattgtggctggagtcagactggagggcttcctggaggaagtggcctctaaactgaacccacagcagaagtggggctggtagggggaggggagatgaaggagagcaggcaccccaaaagacagacttcctcgcaggattgcataggacattcatgggctccaggcacttttgccttgatgggccccttcctccacaaaaaaattgagaattatgttttaatattcttatacaatgtataaagttttatgtgttactataaatacaagtctttttttttcctatttttttttttttttgagacagagtctccctctctgctcactgcaggctccgcctgccagattcacaccattctcctgcctcagcctcccgagtagctgggactacaggcgcccgccaccacgcctggctaattttttgtatttttagtagagacggggtttcactgtgttagccaggatggtctcgatctcctgacctcgtgatccgcccgccctggcctcacaaagtgctgggattacaggcatgagccacagcgccccgccaagtctttttttttaaattcttttgagacagggcctcgttctgttgcccagggtggagtgcagtagcacaatcatagctcactgttgcctcaacttcttgggcacaaacgatcctcccacctcggccttggagtagctgggactacaggcacatgccacaatgcccagctaatttttaaattttttgtagagatggggtctccctttgttacccaggcttgtctaggactcctggcttcaagccatcctcccaccttggcgtcccaaagcactgggattacagacatgagccaccacccacgcctgatcagcaaatctattaatattatatattacaacattaattttgacctggaagttcattttttcatttttttttttttttgagacagagtctcactctgtcacccaggctggagtgcagtggcacaatcttggcttactgcaacctccgcctcccaggttcaagtgattcccgggcctacgcctcccgagtagctgggactacaggcatgtgccaccatgcccagctaagttttgtattttttagtagagacagggtttcatcatgttggccgggctggtctcgaattctgacctcaggtgatccgcccgccttggcctcccaaagtgctgggattacaggataagccaccacacccagcctagttcatttttttcttctgattttattttatttatttatttattttgagacggagtctcgctctgtcacccaggctggaatgcagtggctcaatcttggctcactgcaagctctgccttcagggttcaagccattctcctgcatcagcctcccgaatagctgggactacaggtgcctgccaccacacccggctaattttttgtatttttagtagagatggggtttcactgtgttagccaggatggtctcgctctcctgacctcgtgatttgcccgcctcggccttccaaattgctgggattacaggcgtgagccacagtgcccggcctttttccttctgattttaaaagaaattaggccaggtgtggtggctcacgcctgtaatcccagcactttgggaagccaaggcaggcggatcacctgaggtcgggagtttgagaccagcctgaccaacatggagaaatgccatctgtgctaaaaatacaaaaaattagccgggcgtggtggcgcatgcctgtaatcccagctactcggaaggctgaggtaggagaattgcttgaacccaggaggcagaggttgaggtgagccaagatcgcgccattgccctccagcctgggcaacaagagcgaaactgtctcaaaaaaaaacaagaaagaaaaataaattaaaacatttgcctcttgagcttcaagtcagtgacaagttaagaaggaaaaaaagaaaaaagacacaaaaaacacatttccatgggcccccaaaagtgtgacaggacctggtcatggtcccggttccccatcgatgggtcagtcatgccttgtcctctgagggcaccagtgcccacggtgcagagtgttggctgtgtcagtgtgtcctgcagtctgggagggacagttaaggttggacactggcctggaaggccctggtggcccctgagctcgccacccacctgtccaccctcctaggatatgtgccaggccctctcctgccacacagacccgctggaccaaagcagctgcagccgcctcctcgttcctctcctggatgggacagaatgtggcgtggagaaggtcagagccaagagtgaatgagtgggctcctgtgagcacgtgcacgtgggtgcctccagccaggccgccctattcctaggtcaggaggcaggaccagtatggggcagagagtcttggagttggccttggggactgtcctttgggttggtggtctgacctctttcctttagcatttgctcccatgcagaatgggaatgtgggctgcctgttgtatggggggtgcccatgggtgtggggttcctttgggtggggtccctgtgtgaaggtccttgtggatatggggtgtctcgggggggatccctgtgtaaggggtccctgtgagtgtagagtccctgtgggtggggtccttatgtgtgtgttggaggatccctgtgtgttgaggggtccctggggggttctgtgtgtatgttggggggtctctgggtgttggaggatccctgtgggtctgggggatccatgtggctggggtacctgtgtgttggggggtctctgtgtgtgttggagatccctgtgtgttgggggatccctatgggtgagttccttgtgtgtgtttgggggtcgctgtgggtggggtccctgtgtgtgttggggatccctgaggatgttgggggactctctgtgtgtgttgggagtcctgtggtggggtcactgtgggatgggagatgaagccatccttgccttgcagtggtgctccaagggtcgctgccgctccctggtggagctgacccccatagcagcagtgcatgggcgctggtctagctggggtccccgaagtccttgctcccgctcctgcggaggaggtgtggtcaccaggaggcggcagtgcaacaaccccaggtaccgcagggagggtgcttttctgtcagggagtgtggccataccatagtccctagttgaaggcagtggtcaccctgctctctcaccctcctgtctgctgggcattttcagacctgcctttggggggcgtgcatgtgttggtgctgacctccaggccgagatgtgcaacactcaggtaggcctgcttcctggggtaggagggggcagctggtggcaccgggccctgggggagccaaagtgaccatctgtggttcacaccaggacacatttgagaaggacattggggccaggtgaggtggcttatgcctgtaatcccagcactttgggaggccaaggcaggtggatcacctgaggtcaggggttcaagaccagcctggccaacatggtgaaatctcgtctctacagaaaatacaaaaattagccgggcgtggtggtgggcgcctgtagtcccagctactcgggaagctgaggcaggagaatcacttgaacccaggaggtagagcttgcagtgagccgagattgggccattgcactccagcctgggcgacagagtgagactctgtctcaaaaaaaaaataaaaattaaaaaagagagagaaggacattgggaccccagttcataaaccaggccagtcctgctgatgcccacagagcccctgaagcgtcccgcctccctccctgagtgccactttgccctccagagcgcatctctgcagggagaacctccccactaggaatacagtgcgctgctgcatgcctgcaaaggaattttttaaatattatttttatttttttagacagagtctctccctgtcacccagactggagtgcagtggtgctatctcagctcactgcaacctctgcctcccaggttcaagcgattctcctgcctcagtctcctgagtagctgggactacaggtgcccgccaccacgcccggctaattttttgtatttttagtagaggaggggtttcaccgtgttagccaggatggccttgatctcctgacctcgtgatccgcctgcctcggcctcccaaagtgctgggattacaggtgtcactgcgcctggccgaaggagtcttttatttataaattgaggtgacattcatgtagcatgaaatcaagcattttaaagtggcaactcagtggcctttagtacactcacaaggttgggcaagtactgcctctgtctagtttcagaacgtttccagtactctggagtactctggagtgaaccccatatggtaggctgtcactccccatttctcctccgccactcagcggccattggtttcccttctgtctctgtggattgacctgttctagacatgccacgtacctgaggccagacaacaggtgtgcttcctgcctgccttcctcccccagcggcacgtccccaaggctcacctgtgttgtagcctgtgtcagcgcctcattcctctttctggctgaatcatattccactgcagggatagaccacattttcatccagtcgtctgctgatggacatctgaggtgttttcaccttttggctcctgtgaacagagccgctgcgaatgtgcttgtacatgtttgaatccctgttttcaattcttttggcagtatgctgaagagcggagttactggatcgtatgggaattgtatgtttgacttttttttttcttttttttttttttgagacagagtcttgctctgtcgccaggctggagtgcagtggtgcaatctcagctccctgcaaccttcgcctcctgggttcaagcgattcccctgcctcaccttccggagtagctgggattacaggcacgcgccaccatgcctggctaattttttgtatttttagtagagatggagtttccaccacgtcagccaggatggtctggatctcctgacctcaggtgatctgcccgccttggcctcccaaactgttgggattacaggcatgagccaccgctcccggcctatgtttgactttttttttttcttatttttttctttctttctttatttttttttttttagagatggagtctcgctctgtcgcccaagctggagtgcggtggcgcgatctcggctcactctaagctccgcctcccaggttcaccccattctcctgcctcagcttcccgaatagctgggactacagacgcccgccaccacgcccggctaatttttttttgtatttttagtagaggcggggtttcaccatgttagccgggatggtcttgatctcctgacctcgtgatctgcctgcctcggcctcccaaagggctgagatcacaggcgtgagccaccgcgcccagcatgtttggcttttaaagaaactgccaaaccgttttccacagtgcctgaactgtttcacattcccaccagcattgcgccagggttccagtttccccacatccgctgcagcacttgctgttttctgttgttgttttttcttttctcttcttttttttttttttttttttaatagagatggggttttgtcatgttggccaggctggtcttgaactccgaccccaggtgatccgcccaccttagcctcccaaagtgctgggattacacgcgtgagccatggcgcccggcctgttttctgttttttgattttggccatctcggtggtatgaaatggtagaaagattctttttacattgagttaaattctatctcctgcttcgatggccctgggtgtgggtttgtccctggctgtattacagttctgcatgtggtgagaccctccctttcctccttctccaaatggaccaccaagacctccccagaccgtgaggggagggtctttggctggagcacagggtggtgggatttcgtggaggcagtgtggtcagtgtggctgtccagggagtcaactccggttatcttctgtcagcccataaaagtccaagacgcctgcctgagtgcagaggcttcggtggtgaggtctttgctccatgctttggttacctgcctctaggtgcactacctaaagaatacacatccccgtccctgttttattgagttcaggccttggaagcagaggctctgagcgtaatgctctttcctggctttcttcttcgttgctgccctgtgttctttacggattccccggggttttcccatcaatagagagaggcaggcacttttgtcaccccagtttacagagcagggaaccgaggcacggcctggagctgaggccacacccacatcttgatcctgtactgtagggtgccatgtagtctcccagtgacaacacccgccccccgccccaccgccatccccctcctctgcctcctcctggccaggcctgcgagaagacccagctggagttcatgtcgcaacagtgcgccaggaccgacggccagccgctgcgctcctcccctggcggcgcctccttctaccactggggtgctgctgtaccacacagccaaggtggggcctgcggagtgtggggttgggggaggagccagccctggagaccctcggacagggcagagtcataggggggttggcctactatccctccagcactgggcaaagtggttcaggctctggcatcccacagaccatggatgacatagtggccaggcctcgctggtagatcaggcactgacatcccatctctgagtctcaatttcccatctgtgaaatggagataatagcagtaggtccctccctgggcgctacaaggattcagggagataatcggaaaatgccaagtgtgttccttggttcatgatactttttttgtgagacagagtcttgctctgtcgcccaggctggagtgcaggggcgtaatctcagctcactgtaacctccgcctctgggattcaagggattcttgcccctcagcctctcgaatagctgggactacaggcttgcactaccatgccggctaatttttttgtatttttagtagagatggggtttcgccatgttggctaggctggtttcaaactcctgacgtcaggtgatccgcctgcctcggcttcccaaagttctgggattacaggcatgaaccattgcgcccagccttggttcctaattcaataccattaattattagattagattaggatcgtgattaggattattgccttaggaggtgggatgtggggaagatagaaacccttgccccagatgcaaaggatgaagctgggtgggggctgggggacttgcccctcctgctcggttcaggacaccctttttcactctgccctcccaggggatgctctgtgcagacacatgtgccgggccattggcgagagcttcatcatgaagcgtggagacagcttcctcgatgggacccggtgtatgccaagtggcccccgggaggacgggaccctgagcctgtgtgtgtcgggcagctgcagggtaggcgtgtgtggacattggcgatggccctggggcctacctgtcctatcggaaggctcctgggggcaggttggtgggtgctggccctgatggagctgcagtgccctctgcaggggagtggtgctggggaaaaggatctggacttggagtcagcctgggttaagggctgcagtgtgaccttgggcaagtcactgagccctctaagcttgcttcctgtgtagatggtggggtgctatagaagtgttgctggttttgtggatcccagaatctcagagctggcagggctgcagagtcattgaggccagcaccctccagtgacacgggccctctgtccttccctttgcatagacatttggctgtgatggtaggatggactcccagcaggtatgggacaggtgccaggtgtgtggtggggacaacagcacgtgcagcccacggaagggctctttcacagctggcagagcgagaggtaggcggcctccctcggggcagaggctgggcttcccccagcctccaagatggccacagcccagagcgttggtgcaggggctgctcaggtcacagggcctgcacactcactcagccctggatgcctcctgtggtgtcagcgtctccctcttccacttcgccacccttctgtggcaggctcaggttttggccttgatgctgctgggactgtggtgcctcagtaatggtcactcactgtagccgtgctgcaaaaaaaacacagacattggccgggcgctgtgctcacgcctgtactcccggcactttgggaggctgaggcgggtggatcacctgtagtcgggagatcacctacagcctggccagtatggtgaaaccccatctctactaaaaatacaaaaattagctgggcatgatggcgggcgcctgtagtcctagctactcaggaggctgaggcaggagaattgcttgaacccaggaggcagaggttgcagtgagccgagatccctctgcactccagcccgggcaacagagtgagacactgtctcaaaaaaaaaaaaaaaaaagtatggacgttgtgcattctgtggcagctaccctcttctctcctgctcaagaaatcccactgagagggacacaagtgaatgagagggttggtagttacatttggaaaatctttgactttggtgtatatatgaggtcaaaaaccatttgcaaatgccagtgcttctatggagagcagagacttgagccctgcctccctctggcttgccccactgtgctggagaaccttggacccggtcccttctcccagccagggcagagccttggcaggtggtcctccagcctgcttttaattgcccccatgacaggggactcactgctgctggagccagccccatggcattgttcaatttttcccgaccagctaagatcagctccctttgtctgtggtgtggtggctgtgaggtccacgcatctctccttcttttcttctttctagaatatgtcacgtttctgacagttacccccaacctgaccagtgtctacattgccaaccacaggcctctcttcacacacttgggtgagttgactggaggactcccacccagttagctagactgcaaaggtgcagagcactgttgccaagatgccctcacttctgacatcacccgcaagttcagggggttccccaaaccaccctcaggcttgatagttgactaggaagactcccagagctcactgagagctgtggcacatggctgcggctccttccagaagaacacaggttagaattgtccaagggaagagatgtaggcagagtctgggagggtccaaccaggaggcctgatgtctcagggatgtgacacccttctagcattggagcgtggccatacgcatggagtattgcccacacagaaagcccactgagtgggagttgagagtttttcctggggtttgagtgcaaagacatgattgactaattggccaggtggatactctcagtctcttggtgacccagcccctatcctaaatcacatagttggtctttctggtacagccagcccctgccctaaaggaggacacttctgcctggtgtgacccgtgtttcctcttggaagccaacagcaaaagctggacttctctttgggcaaggcccgcttctttgctattgagggccacagtgggtctttctggagtgtgtctgcacctaacctttgaagccttggttgccggcacttgccatggggtccctgagccctgagcctgttgagttctgtgcgtgagtgcacttggtcatagcactcaccaggttgtggaaagaggcctagagcctccgctgtggggaagcctctagctcagatgcctgtggctccttagaggagggctggggaccccgggaaggagagtcactgacatgtgcctgtgaggaggatgggtgctcagctccacacagctaacagggctggttccccgacagcggtgaggatcggagggcgctatgtcgtggctgggaagatgagcatctcccctaacaccacctacccctccctcctggaggatggtcgtgtcgagtacagagtggccctcaccgaggaccggctgccccgcctggaggagatccgcatctggggacccctccaggaagatgctgacatccaggtcagcaggagagcctgggggaggccagtgggggcttcttcttgggggctatggctgcttgctcgtttgtctatccatccattccctgattcgttcatttattcattcagcggtcacttacaggggacccactatgtgttgggccctgtgctaggcaaaatgtagctagctcctccaggggcttagggtcccacaaatatccaaatgtgcctgtgcccagagcccgtgggagaaggccctgcagttctgggatcaggtaaggttggagggcccaatgcaggggtccagggctccctgggaaagagtgatggagctgaggtgtcagatgagcagatgttgctgggccaagcagggaaggaagcgtatggctgagggaacagtgtcagtgtgggagggatgaaggaaggtcctactgtgtgggtttgtggggagatgaaggcatggacgcaggtgcagtggcatctggggagtaggccttggtgctgaggaagctgagaacagatgctggctctcactgcttctttggtgcagtgtgtgtgggaaccggaaggccttgttcaggcgtgtcctcagtgacgtgtgctcgcccatgtatgtccccattggtgcttcgctgaggaaggcacgtggagggtggagagacataagcgcaggctgaaacagacctgagaaccttgggagaggggcccagtctcagcggccggagcagcgtcctctgcccctacagcagccagagacaggagggcctcccacagatcaggccaggccgggccaaagcaagcccctgtgagcggcttatcccttctcttcccctgatatggttcccttcctcccctccccttgcctgggacattgtatccagatgctagctgccgagtggctctcccatcatcctctgcagtgtgtaaaaaagcagattcccgggtcctctgcatattccctgaatcaggacttccctgtgttgggcctgagaaaccgcaccgtaaccaacacaggcttgcggcactggccagatgtgggcatcgagggggcaggtgcggaatgtcacctcgccctgggctctggcctccaggctggcctctttcttgggctggtcttgggcacaggacccagttaccctcctgaagagccttaggcccaggaacctgctgaagttcttcctagtgctctccgggccagtcccaagccagtagctggccacaggtccccagggatccagtttcttcctgccgaccctaccacaggtccccagggatccagtttcttcctgccgaccctacgggcctcagctctggctccagaagcactttctgtgctggccctgccctagcccttcttgggctccttagcccagcctaaggtgggcctgcctcctccactgcactttatcctctacccagccagcttagggaaccttctctgtgctgcccaaataccctatcatgtaacccaccaatgacttggtaattacctccccgagccctctatcccaacccactgagagctccttgcagctcagccagtgtcctgtgcactgtgctatccccagagcctggtacaggtcagtgttggtgattgcttcccgttatttttgtctttgttgtttttttagagagggtctcactgttggccaggctggagtgctatgttgcccaggctgctctgaaactcctgggctcaagtgatctgcctgcctcaggctcccaaagttttgggtttacaggcatgagctaccgtgcctggccagtgattgcttgctgaacgaaagattatagggatgcaagaagaagttggaaggcttcccaggggaggtggccatgacagtgaccctcagggaacccactggacaaggcctgaagctctttgtctgcaggtttacaggcggtatggcgaggagtatggcaacctcacccgcccagacatcaccttcacctacttccagcctaagccacggcaggcctgggtgtgggccgctgtgcgtgggccctgctcggtgagctgtggggcaggtgagacctggggaaggctcatccacagcacggcttgcccctgcagggaggcggcctagccctccctcttccctcccagggctgcgctgggtaaactacagctgcctggaccaggccaggaaggagttggtggagactgtccagtgccaagggagccagcagccaccagcgtggccagaggcctgcgtgctcgaaccctgccctccctagtgagtgtggtgctgtctgcgcagctccaagggggagagagggttccgctggggctgctgggctctgtccctggcctatggggcccatgtggcagggccgggctgagctgctcctgtgcaggctctcattacccctgcccacagccctgcaaggggggctctgtgagtgcccccattctgcaggtgaggacactgaggcttggggcagacatggtgacaatgtcagcccagtgggacccacacctgctgccaccttgtctgggccaccgaggcctctcttgagctcaggtactcatggtgagatggaggtgattgcctacctggagggttgtagggagacttgcggagctcctggtgcaaagcccctggctgtcaccacacctgacggggcacactgttagggacgaggccattcctgctgggtgcaggacagggcagctgctcaccagcctgtgattcggttgtcctcaggctcagccgtctggcagcctgggaacacctggagaggctaggctggccgtagtgcccattgcttgtcccagaccgggggagtacatcagcacctgccaccccatcaccccaggccagcctgggacctggccagggtcccgacgctctgtctccttcctcagctgggcggtgggagacttcggcccatgcagcgcctcctgtgggggtggcctgcgggagcggccagtgcgctgcgtggaggcccagggcagcctcctgaagacattgcccccagcccggtgcagagcaggggcccagcagccagctgtggcgctggaaacctgcaacccccagccctgccctgccaggtgagcccagggctaggtggggctgggagagggccttcctggcagagctcgtccctgcgctgagcccccatccttctgagaatcccctcctcctgaggcctccggcggggcctcaccatccagggtgatgggcagtgtcacctggcggttgtaagtgctgctgtcagagttccttactacccaggagagcctgggcccattgtttccctctctgagcttccgagcccctgctctgaaatggggatgccgacctgcctggggagggggggcttcgaggatgaggtcaaactgaacggagtgggagatgtcactttctcatcaccaccatctcccccgtgcccacgtggctgcatctcatcccctcagtgtccaagttgacagtggcttatcatcctgccctgccactaacgagctgagtgacagggcaagtcccctcctctgtgggcttcagttttgcgacctgtccggtgggaggggattggtctggattgttggtggcccactcatagctctggactcctttccccgcctcgtcatccgtggcagacaaaacagtcaccactcttccccgctgaggccagatagggcctcagaatccttctcacacagctctccaggcagccactttagcgcagggctgactcacagctgaaacccattggccacccttgaacctggtgatccaattccatgtggcacctgtttctctgcacctgctatggtgcatggagtcagtgattacctggctggaggtcggcctctgcctctggagagtaggagggatgggttctcttttttttttttattaaaagacagagtcttgttctctcacccaggctggtatgcagtggcatgatcttggctcactgcaacctcctgcctcagcaagtgtgcgccaccaagcccaactaatttttgtattttttgtagaaacagggttttgccatgttgcccaggctggtctccaactcccgggctcaagcagtctgctcacctcagcctcctaaagtgctgagctaccgtgcctggccagggataggttctgtctctgcaccctgggtgcaggtggggtgcctgactgttgagcagcgagtgcttgttgaatgggaacctgctggctgatgaatggggaacccggtgcttcagggagagaccctgagcttcacttctctgtggggctcctctttgggctcctggatgttggggagcaggtccccttcctccctgcccctagcagctgggctataccttcccctgggtggcagaggcagggcctgatgactgtctcatgccatcctcaggtgggaggtgtcagagcccagctcatgcacatcagctggtggagcaggcctggccttggagaacgagacctgtgtgccaggggcagatggcctggaggctccagtgactgaggggcctggctccgtagatgagaagctgcctgcccctgagccctgtgtcgggatgtcatgtcctccaggctggggccatgtgagtgccctgggcatgagggtggctggggctgttgagtcctttacctggctgggagaacgaggagcacccattgccaccgtcctccaggccagagcaagaacaccatccttctgtgggaatgctgtctgagggccacccctgctcagaaaagaagcttagaaagagggctcagggcccctgggaaggctcccattccccttgcaagccgggctgagggaagcatctgaggagagtgtaatgcagctgctgtgcagagaaatgctgccaggctcccgcctggcgtccaggggctggaggctgactggccttgctctctggcctgggtgctggcaaccctcgcccctcatggctggggggattgcagggccaggcatgctcccatgtcccactcttggtccccagctctcggccaggcccacagtgagcactcatgctgctgaggagcctgcaaaggtggggtgtgcagcaaggatacccgctgcgagaccggggagccgatctcgccaagggaggaggggagggagcccctggtgcacacacgccacttcctggtctctctgctgctgcctgagaagatcgagacggggatcgctgggtcctcagaggaggcccagacccaccagcttgttgctattccccacagctggatgccacctctgcaggggagaaggctccctccccatggggcagcatcaggacgggggctcaagctgcacacgtgtggacccctgcggcagggtcgtgctccgtctcctgcgggcgaggtgagggcccccgggatgctcctggggaccagcactcatggtaactctcctgtccacttgcatcttgcctcgttctgaaaagcatttgaggtggattgcagaaaatccagactatatgggaacacgtggtaatacacaaggagactaagcatagtagctgacagccacttcaaatgtgggtgttgattggctgaaaggtaggaaaagacaataacgcccggcagtgtggcacgagagccattccttatggtcctagcagagcggccggggggtccccaattgatgacccgagcagagaaaccttagctttaagatacacagcgttcttctattttcccaatcttgttttattgcagtataacacagatattataaaatttaccatccaaactgtttctccctgtgcaggtcagtggcataaaagcacagtcacattgttgtgcggccatcaccaccaacctctccagaacttttccagtttcgcaaactggagctctgtccctgtgaaacacgaactcccatttccccctccgcagcccctggcaacctccattctcctttctgtctccagattccacaattctagggaccttgtagaagtggaatcatatagcatttgcctttttgttactagttttcactcagcatgatgtcctcacagttcatccatgttgtagcatgtgtgagtgtttccttcttaaggctgaaaaagattccattgtgagtgtatcctttacaggtttatccatttattcatcagtggacacttggcttccttccacactttggctattgtgaataatgcttctgtgaacatgggtgtgcaaatatctgtttgagttcctgctttcagttcttttgggtgtatatctagaagtgtggtagctgggtaagatgagaattctatgtttaatttttgtggaactgctggactgttttccccagtggctgcaccattttacatttccactaatggtgcataagagttccaatgtcctcccatccttgccaacactttttatttctatggttttttttgtttttgtttttgtttttgagacagagtctcattctgttgccgaggctggagtgcagtggcatgatcttggctcattgtaaccttcgcctccggggctcaagtgattctcgtgcttcagcctcccgagtagctaggactataggcgtctgccaccatgcctggctaattttttgtttagtagagatggggtttcaccatgttggccaggctggtcccaaactcttgacctcaggtgatctgcctgccttggcctcccaacgtgctgggattacaggcgtgagcccccacacctggcctatttctgtgttttttttataatggccatcctaatgggcttgagaagacacaccatgttcttaaacgaaaaccctgaccacttgctcagtaaaatgtcagcctgtttaaaaccgagaccaaaaagagatttctttttctctcttttcttttttgagacaaaaaagaaaacctctgtcaccaggttggagtgtagtggcacaatcttagctcactacaacctccaccacctgggctgaagccatcctcccccctcagcctcctgaatagctactataccctgctaatttttgtagttttggcagagatgggatctccctatgttgcccagcctgatctcctgagctcaagcgatccttctgcctcggcctctcaaagtgctgggattataggcatgagccactgtgcccaaccaagagattttttttctttttcttttttttcttttttttgagactaagagttttcctctgtcgcccaggctgaagtgcagtggtgtgatcttggctcactgcaacctccgcctcccatgttcaaacgattctcatgcctcagcctcctgagcagctgggactccagctatgtgccaccacacctggctaattttttgtattttattttattagagagggggtttcgccatgatggccacgctggtctcaaactcctgacctcaggtgatccacccgccttggcctcccaaagtgctgggattacaggcatgagccactgagcctatttcttttgaggatattcctaaaagagagacttgagaaaactggccctaataacatctttatgatagacacaatcagagattttcatattgtgatttttttttcttttttttttttttgagatggagtctcgctctgtcacccaggctggagtccagtggcgcagtcttggctcactgcaacctctgcctcctgggttcaagtgattctccgtctcagcctcctgagtagctgggattacaggtgcgcaccaccacgctcagctaatttttgtatttttagtagagacggggtttcaccatgttggtcaggctcgtctcgaactcctgaccttgtgatccgccgcccaaagtgctgtgattacaggcgtgagccactgtgcctggcccatattgcaattcttataatgcctctcggtcaacaataacagctaccatttgtcaagtgtctactgtgtgccaggcacttgttatcttcccttttaaaaatctttataaatgattctgcaaggtagatgccattatctttttttctaaatctaagattcagagggttaagtcagttgtctgaggtcacacagctggtaagtggcagagccgggattgaaacccatgcgggccttatgtgctagaggtgtccagtgagcctgggctgcagtccttgctgagcctgtcccttggggctctgggtctctgctttgtccacgcaggtctgatggagctgcgtttcctgtgcatggactctgccctcagggtgcctgtccaggaagagctgtgtggcctggcaagcaagcctgggagccggcgggaggtctgccaggctgtcccgtgccctgctcggtgagtgaggggagcaagactgtgtgctggccttctccctgtaagtgggagacccgagccttggctccatgcccggtgacctgcggaggggggcaggtgctgctggctgtgcactgtgtgaggctggaccatggccgccccatccccctgcctcactccaagtgcaggccagagccccggcccagcccctttgaggactgcaacccagagccctgccctgccaggtgggccccttcccaaggagacagggggtgctaggtctgcatcctggctctttcctcacctccaagccagaccttttgaccctcagtgtcctcaccagtgggagcaggtcattttgtgcccccagaagactgggggagtttaatgaaaggattagatgcatgtaaagtacatgctaaatgcaatgagtgtaaaatgcatgctcgatgcaacgcgtgtaaagtacattgcacaggatctgggatgctgtgggtgcacatggttgctggtgcgtttcttcatcgcctgctctttatggagcacctaggccccggggccgtcctggagctaggggacacagcagagaacaaggcagacaaatgtccctgacctcctggagcaaatgcagggggaaagggggacagataataataggacaggcggggaatgcagtttgatggatggtgttcagtgcgatgcagccaaacacagcgggaggggaggaggggagggctggcggggtgggctccagggcggtggtgctgggatcactgttgaagacagacatgcagggcccttgggtgcccggacccctgcccccactgtctctgggatacgacatctgtcgtttgccctcacctttctcttctgtaaaatgggtttgtccaaatgttctgtccactctgccaagcctcttggtgaggacacaagggggcctccagaaagagaacctctccgggcccttcccagcttcctgtctcttcctagtctggggaaatgaaggggagacctggctcccctgggttcccaggccctggggctgtttggggtccctgactccagtttgctccaggtggcagtacaagctggcggcctgcagcgtgagctgtgggagaggggtcgtgcggaggatcctgtattgtgcccgggcccatggggaggacgatggtgaggagatcctgttggacacccagtgccaggggctgcctcgcccggaaccccaggaggcctgcagcctggagccctgcccacctaggtgagtcagccggtgatgggaggggcagctcctggtgtgtgcagatgccaggccaggcgctgtggtgtgtgcctgtaatcgcagctacttggaaagctgaatcaggagaaccacttgagtccaggagtgcaagtccaacctgggcaacacagtgagacctcatctctaaaaaaaaaacaagacggggccaggtgtggtggctcacgcctgtaatcccagcgctatggaaggctgaagcgggtggattacctgaggtcaggagcttgagaccagcctggccaacatggtgaaaccccatctttactaaaaatacaacaattaggctgggcgcggtggctcactcctgtaatcccagcactttgggaggctgaggcgggcagatcacctgaggttgggagttcgagaccagcctgtccaacatacagaaaccctgtctctactaaaaatacaaaattagccgggtgtggtggtacatgcctgtaatcccagttacttgggaggctgaggcagaatcgcttgaaccggggaggccaaggttgtggtgagccaagattacgccactggactccagcctggctaacagcagcaaaactccatctcaaaaaaaaaaaaaaaaaaagaaaacccacaaaaattagcctggcgtggtggtgtgcacctgtcatcccagctacttcagaggcggaggcaggagaatcgcttgaacccgggaggcggaggttgcagtgagccgagatggcgccgctggcactccagcctgggctacagagcgagactccgtctcaaaaacaaaacaacaaaacaaaacaagacggggtggggggctcagtggcccaagagccagtctgtaaggaatagggctacctggcaggctgtgctagttgtgggaggtgaagtttaagcaccatgcaggcagggtgcagtgtggggaggcctgggggacagaggaggcagcatttgagcagaacctaaagctgtgagcaccagcattctgatgtggaagacgggagggatggaggtctccacagggacacacacagccacactaggacacgggacagaatcatgttcaagtccgtggggtccggagcccagtggtaaagggcgaacatttgcctacctcatttacaattctttaatggtttctttttgtaggtttgcatttttagtaaagaaatacttttctatatcatacagaaacgtccagaaaagaatgtaacagacatgtatgttccagcactccagtttaatagatagcatcctactgccatgtttccttcctgtccacttacttttatttatttaatttatttattttgagacggagtctcgctttgttgcccaggcagtgatgcaatcttggctcactgcaacctccgcctcccgggttcaagccattctcctgtctcagcctcccaagtagctgggaatacaggcacccacaaccacacccagctaacttttgtatttttagtagagacagggtttcaccatattggtcaggccgatcttgaactcctgacctcaggagatctgcctacctcagcattccaaagtgctgggattacagatgtgagccatcacacctggccagcctccttagttttaaataaatccagttacagataagatttcacttaaatttaggctggtcatggctcacgcctgtaatctcagcacttcaggaggctgagatgggtggatcatttgagcccaggagtttgagaccagcctggacaacatgccaaaaccttgtctctactataaatacaaaaattagccgggcatggtggtgcatgccagtatccccagctactcgggaggctgaggcaggagaatcacctgaaccttgggaagtcaaggctgcagtgagcagagatcacaccaccactgcatgccagcctgggcaacagcatgagaccctgtctcaaaaaaaaaaaaaaaaaaaaaagattttacttaaatttaaaccctgtactaatctgtgatttatttggagtatgttgcaaagtagggaccaaaggatttttttttttttctaaattgttaactagcatctgttggacaagccctgatgcctccaggtggctccttggtggtattggtgtgtgttagaatctatgtctgggctttctactgggtttttttcttctccttttttttttttgagacagtttttctctgtcacccagggtggggtgcagtggcgcgatctcagctcactgcaacctccgcctcctgggttcaagtgattttcatgcctcagcttcccgagtagctgggattacaggtgcccgccaccacccccaactgattttgtgtttttaatagagacagggtttcactatgttggccaggctggtcttgaactcctgacctcaagtgatctgccaggttctgttttttgtgctttttttttctagctattctcttgcccatacaaaattgttttaaatgttgtagctttataaccatttaacatctgtgtcactagtgtgtcctgatttctttgcctatgctaaagtcccttggctgtgtgtcccatttatttttccacatcacatttagagatgatctgggattttatgggaattgcagggtttttcacactgcacgctgcctgcatggtgcttaaacttcacctcccacacctagcacagcctaccaggtagccctgttctctacagaccacctcttgggccactgagcctcccctcacttttttttagagatggggtctcactatgttgcccagtctggacttgaattcctgggctcaagtgatcctcctgcttcagcctcccgagtagctgggatgcaggcacacactacatgagctctggccatccctctgacgttgctgtagccacgctggcctcattgtcctggaacattccagggatactcccctgacttagggcttctgtgctagctctcgctgcctgatgtcttctgtggatatcctcgaggccctggatatccctcccccaggctcggctcagacaccacaactccaaagtggcccagtgccctccctgagcgtcggtccagaacggcactctcgtccctcctgtgacgctctgcttggcactttgggaggctgaggcgggaggattgcttgagcccaggagttctagaccagcctgggcaacatagtgagaccccgtctctacaaaaaatacaaaaattggctgtgcgcggtggcttatgcctgtaatcccagcactttgggaggcgaaggcgggcagatcacgaggtcaggagatcgagaccatcctggctaacacggtgaaaccctgtctctactaaaaatacaaaaaattagctgggtgtagtggtgggtgcctgtagtcccagctacttgggaggctgaggcaggagaatgacgtgaacccaggaggcggagcttgcagtgagctgagattgtgctactgcactccagcctgggtggttgcagtgagctgagattgtgccactgcactccagcctgggcgatgagtgagactccatctcaaaaacaaaaacaaacaaacaaaaattacaaaaattagccaggcatgatggcacatgcctgtagtctcagctacttgggaggctgaggtgagaggatggcttgaaccctggaggttgaggctgcagtgagccgtgatcacaccactgccctccagcctgggtgacagggcgagaccgtgtctcaaagaaaaccattaaaataaaataaaaaataaaatttctgcgatgcacacgacagcctccacagcaaatcagcatccagttgctcatgccagtgatgccccaatggagaacaatccacgctctgagaggaggtggggtctggtttggttcactgccacctcccagtgtcatgtagaacagtgccaagccgcggaaggcacgggtccaagaggcagcgctgcagggtcatgggggagcacagtattgcgatgaagatcccagctcccttgcaggctgcctgggtttgtgtctgggctctgaagaatgcgggccataattagttattgattgattacagatcaacatgggcagccttcccttgcccaagggaagggaactcggccttcccttgcagaacgtggggtgttgagatctgtctcctgttacccaggggctcgcttcctgttgctgttacttgggtccataggcaacccctggggtgctgacaggtgttctgtgataaaggcgactagagggggatgtgcaattagggaaacaggggcctcttccccctagggccttttggtagctctcctgtggccgtgagccctggccccagacaggaggggctcagtggctgcactttccatcttgcctggccacggaagctgtctaggcaactgtccgagtacacgtgggtggagaggggcctgcgtggggcagtactgtctctggggagacctagcctctctctggggtcttctcttcctgcaggtggaaagtcatgtcccttggcccatgttcggccagctgtggccttggcactgctagacgctcggtggcctgtgtgcagctcgaccaaggccaggacgtggaggtggacgaggcggcctgtgcggcgctggtgcggcccgaggccagtgtcccctgtctcattgccgactgcacctaccgctggcatgttggcacctggatggaggtgagcacagcgggcactcggaatccctatggggctggggtgggcatcagctgtggctcctcatgtgtgagggagtctaggaggcattggctcatcgtgtcccctgaaaggaaggagagagctgcgcccgttggtgagggggcacctagaggcagagagacagagggcctagagacctgcgggcagctaggacttaagaggcccttaggtttggggacgctggaagatgaatggcaggccactcagctctacacagatgagggaatgccagctgtgccacgcacctggcaaggcaggacagacaagggtaaatggggttcaggctgccccctggaggggctcgctcatggtgtggagggggcataggggcacagcagacagagatgagccgcagccccgcagacctgcttgctctaaggcttggagggacagagaggccgtgagggtgacagggacccagacttgaattatggctcctcccacctatatgacccatgcaaggtgccctctctgagcctcagttttctcatctgtggaatggagacacttaactgcctcccagcttgtacaaggattatattggatcactcctggcctgtggttaccactgtccttgtcaccttctggcagggtcagctgtgactcctcctcccctctcttggcagtgctctgtttcctgtggggatggcatccagcgccggcgtgacacctgcctcggaccccaggcccaggcgcctgtgccagctgatttctgccagcacttgcccaagccggtgactgtgcgtggctgctgggctgggccctgtgtgggacagggtacgcccagcctggtgccccacgaagaagccgctgctccaggacggaccacagccacccctgctggtgcctccctggagtggtcccaggcccggggcctgctcttctccccggctccccagcctcggcggctcctgcccgggccccaggaaaactcagtgcagtccagttatgtcctgtcctccttcctgtcaggcagctgctgcaggaggggtgggcaaaggcatcttcctctgggaaggactggcacaagcacttggtccctgggttgtgtgcctgggaggccgggatcagggctggccctctttctccctggcaaagcaaaacctcccttttactactatcaaggggaagtaacttgaaggtaggaacccagcttgtgagccccctagcctctgggctgctctgcatgtgccccctcttgctggatcatctggtagcagccctgtgccctgagggtgatgctctgacctatgcagcccccctccctgtcctgagaaggcttccagctgggccttggaggacagggtccacccctacctcctggtctccttcctcagcttggaagccccggagcctgccctgctgggaatcggggaagcactgcttacctgtctcctgctcccttttcaggtgcctgtggcaggcagcaccttgagccaacaggaaccattgacatgcgaggcccagggcaggcagactgtgcagtggccattgggcggcccctcggggaggtggtgaccctccgcgtccttgagagttctctcaactgcagtgcgggtatgtctagggccatgcaagcgatgctgccagttatgggccctgccaggagccagcacgacgctgcatgccccattcctggcaggagcccatgtgcattcccacctgtagtttgcatcccatctcatgactggggagtgatgatctgcattttacagatgaggaaactgaggctaggagagattaagtgatgtgcccagttacttagagtcacatagccagcagtgggagaggtgggacttgaactcggctcagtctaccctggagccactcctctgctgaccaggcgtgggagtgctggaccctcactgccctgccgcttcctaggggacatgttgctgctttggggccggctcacctggaggaagatgtgcaggaagctgttggacatgactttcagctccaagaccaacacgctggtggtgaggcagcgctgcgggcggccaggaggtggggtgctgctgcggtatgggagccagcttgctcctgaaaccttctacagaggtatggccaggccttctccacctcccttgggtgctccagtcctggcagggaggctgggtgggtgctgctggggatggggccagtcccagtggggcagtgggaagatacggagggaactgactgagatggaaggaactggggttggccagtgtcagtctgcacgtgccagggaggggtcacaggatgaatgctatatccctcctttttgggaccgtgcagcaagatggacggatgtgggacatggtccacatcctcagtcagtccctcaggcctctgccccacacccacctgccccgcccccacccctccagcctttcaagggcttttagggttttgtggaagccactgtccctcagccctgtttcagtgcactggtgtaagcagacatgcttgtacatgcatgtgcacccacaagcacacctcaggcagaggatgccacctcagggactccagccttgcccgtggccccctcgatatcctctgatagccctctcggttgtcctggggggcttgccctctcccaacagcccgagctggccgaagttggcttccctagctggttccagaggttcctcggctcccccaggtgtctggggcttagtggcaacaggggcttagcctctgcagagacctagtgcgccgcctccttgccccagacctgcccgggcagagagccgtgtatgtgtcccagtgcacaggcgctgctgggccctgccaaaaggccacaagcccactgtcaccgttcacattgcttctcgcttcccggcccagccccgcccacacaggcatctgccttgaaagaggtgcaggaggtacaggcaggtgggggctccagtgagctctgaggaacagcagtggccgccatgggtggagcctatctttgttgccagtttcagtgttaaacactcttgcacgtgtgacatcattgagtcctaaagaccactctgctcagtgcatgccattgtttccttcagttacagaggagggaaccagagcccagaacatttagcctttgcctaaagtcactgggccaggaagtggtagaggtggggttcagcaggatttgcctgggaaccccaatattgaccacagtgccatgctgccctgcacggctccctggctgtgagttgtcctggcctctggcaccaccggtctgtctgggttcctatgtccctatgtcccacctgcagaatgtgacatgcagctctttgggccctggggtgaaatcgtgagcccctcgctgagtccagccacgagtaatgcagggggctgccggctcttcattaatgtggctccgcacgcacggattgccatccatgccctggccaccaacatgggcgctgggaccgagggagccaatgccagctacatcttggtgaggcccagcatggggacttgtgctgtgattctggacagctttccctagggcgtgcagggctaggggacccccttcagtttatttcagactaaaaccctcaaaatcattagtgaaagaatgggagaagatagcttcctccacatattcaccaagaaatgttttttgagctacctacaagagtgaaatagtggctcacaactgtaatcccagcactttgggaggcccaggagggcagatcactcaaggtcaggagttcgagaccagcctggccaacatgatgaaaccttgtctctactaaaaatagaaaaagtagccaggcatggtggcgtgtgcctgtaatcccagctacttgggaggctgaggcacaagaatcacttgaacccgggaggtggaggttgcactaagcccagatcgcaccactgcactccagcctgggcaacagagtgagactctgtctcaaaaaaaaaaaaaaaaaaaaagcgaaatggtaaagaatggtaaagacctttctgatgtagactgacagctaacccaagactgaagcataattttacagtctgatataacttggacagaatagcaccctgcaccctccccgaggtttcaagtgtcctgggagaactgtgttctgcagggtatcagcttccccagaggaggcagcctggccccgctctggcaccctgactgtgtgtccttggggaagtgatgtaacgtccctggacctcggttttctgggtagagtaatggcgtattcctagtagggctttgtaagcattaaatgtgatccggaatctgtgagcccttgcacacgaaggcttccgtgagtgctaattattacttgtggccggtccttctgggctgccccttttctctcagatccgggacacccacagcttgaggaccacagcgttccatgggcagcaggtgctctactgggagtcagagagcagccaggctgagatggagttcagcgagggcttcctgaaggctcaggccagcctgcggggccagtactggaccctccaatcatgggtaccggagatgcaggaccctcagtcctggaagggaaaggaaggaacctgagggtcattgaacatttgttccgtgtctggccagccctggagggttgacccctggtctcagtgctttccaattcgaactttttccaatcttaggtatctactttagagtcttctccaatgtccaaaaggctagggggttggaggtggggactctggaaaagcagcccccatttcctcgggtaccaataaataaaacatgcaggctgaccggcgtttttttcttataagctgtccagacctggcttgaaaacccatcccatggcaaggcagggattcgctggccgcggttggctctatcttgatctgagcaagccgctggacgtccctagttatcttcttcctatccaggaagaaaatccaatcaggattccactccgaggatggcgcattagccagctccctgcgaagccccacccgtgtgtcctggtgtgaggctctgaccgctaaggtgtctgcgcgcctccaggccccgccccctatgctaataagcgcccgcctcctttgggagcaagtcgccgcaaactgcgagcccccgccccctacgctaatgacgcccgcccccctcgggcacacctctccgatgcctgcgagccccgccccgtatgctaacgagctccccacccccagctcctcgccgcagcctgcgggtcccgccccctacaataatgagcacctacctcccctcaaacgcccctagtcgcggcatgagggtcccgctcactatgttaatgagcacccgcctcccttcgggcgcgcctcgccgcagcctgaaagccccgccccctatgctaatatgctccctctcccacaaggcagcgcgccggctcggacgcggccggctaccgagccctttgtgagggctgtgagctgcgcctgacggtggcaccatgagcagctcaggtggggcgcccggggcgtccgccagctctgcgccgcccgcgcaggaagagggcatgacgtggtggtaccgctggctgtgtcgcctgtctggggtgctgggggcagtctgtgagtatccagtcggggagaggggccggccccgccgcgcatgcgctcctcgccctgccctgccccgccccgccccggcggccccaggggaaaggacccgctgggggtcgggggtctgccgggcgcctcccggggcggaggaatggcggggccgccgggagccggcgtcctggggttgccatggttacccgctcgggcctgggcgccttggtaccccgggctgggctgggctggcgcttctgggaacattcccggagggaccagaaaccccagggcgggggggcggcgggggcgggggtggggcaccggcctggggcacgtgactgagccctccccccgctccccaggggcttttgtgagactttctcggtgatgctcacggggcgcatgcccacctggcccgtactaaagcgtcaactgttgacttgggcgtaggtgacggcagccacattgctaacctttgggcaaggattgtttgtaagggaggcgggtgcacggctggctagatttctggcaggaagccactgggcggaagtttgctgagggtcaggtggtgtcagggcacaggtggcccctggggccgcggggcagtgagctgagggcccggcctctccctgggtcctctgtccgctctcatatctcccccgttgctgctgccttagccgcctgtcaccggccttcctccccttctccgcacgcatcccagtcacagaccctgaccttaggctgccagggaagctaggctcttaagcacagccagaaaaggacaaagagggaggcaggtcagctccaggagtgaatggaagccgtacagctggccttccagggaaagacaagtctgtctgagtgataccctttcctttcctgtctgccctcaatcttgtggattactggagtgggcaaggtcttagagaatgtctgtcgaggatgtctgcaggttttaaacagtgcctgcctggcagagagggctagctctgggcctgggcagggcaggccccatcagcaatcctgccagaaggaccaccttttcagggtcaccttgggttccacagcctttccaggtgggtagagggtggagggaggttgaggcaggagggtgctgggctaggagtgtgctgccctcgctaggcatgcccttatccagaggcaacggatacggtagggcaggccctacccccaaatcacaaaaaggccccgag

SEQ ID NO: 742 - DNA, 297579 bp, Homo sapiens
ataatttagttgatctgaaggctgtctctaaagcagttttatgtagtgattacagagaaggactaatttcaagagtattttattgtttaaaaaaatgtaaacattttatggatgcactagtgaagtaaagaccaataaatgaagcagtaactttaataaaagggtaagtaaaatgtcacatcctctgcctatattcaggtctgttaggtatgtgtagttaaatgtaggtaagttagttgataattatttatttaagcatttctttatgtctactcattaaaaagaaaaaaagattaaaagaatgttactatgtgaaaaactgcccatcactggggaaaagaattttattatgcaaagcttcaacgctatttacagtttagacttttgtagctattgaaggctgacattgagataaagaagttaatcatgtccttctgtcttggaggaggtagaaagagatgagaatgaatacaattcaggatctacttctggtctttgatgaggagttagcacacggttctgggaggaaagacaggttaagaggcatgtgaaactctcaaatacgtcactgcgtctgccaacgtacatgatacccagcaagctcacatcttcatggaaagcatggtaattcccaacactaccggaagtctggagtggctaagtaatccatatattcaaccaggaagcagctaaagaaatattctaattacctaggaaggtttctgatttcaaaaggacatgaataaaaagtagaaggaatccactcccaaggacggacatcagagtagcttaaaatgtgagaataattttaggggaattttagaggtttggttatagacttatgttcccccaaaattcatatgttgaagccctaacccccagtaccttagaacatgactgtatttgggtagggcctttgaagagctaattaaattaaggccactggcgtgggccctaatataatctggctggtattcttgtaagaggaggagattaggacacacagaaataccagaggtacctgtgcagaggaaagaacgtgtgaggacttagcaagggtgcagccatctgcaagccaaggagacctctgaggattccaatcctatctgcatcttgatcttagacttttctggaactgtgagaaaataaatttcttggtttaagccacccagtctgtgatattttgttatggcagctctagtaaactaatacagattttaaatgtcattaaatgtcaatgtttaagctttgacaaaattttctaaaggaaagtataaaaggtcattttctttcttttcagagcctgatgattgcgggaggggtaagccagctgcatggggatcatgatgcaatgctgatgcaggacagacagaaagtagatctcttccatttctattttttttttttctgttgagttgaatgatcttcagactgaaaatgaaagaaaggtcactggaaataaaggccaaagatgagtgacaggattatagaataagtcttagctgttctaaagaaggacatattatgtacccccacccccaaattcatatgttgaagtcctaacccgacagtgtctcaaaatgtgaccatatttggagatagggtcaaagatgtaattaaggttaaatgaggtcattagcatggatcctaacccaatatctgctgtccttataacaagaggagattagggcacagtaagacacagagggaagaccatgtgagaatacagggagaaggtggccatctgcaagccaaggagagaggcctcagaagtaaccaactcagccaacacctcgatttcagacttccagcctcctgaaatgtgaggaaatacatttctggtgtttgatccatccagtctatggtaagttatggcacccctgcagggttcatctggctcagacttaacgattgcttttggtgatatttatagggcacagataacagcctaaacacaagacgacagaaacgcggcccagcagactatgcataaaatagaaatggggtatctggaccaattggagtctgcagtgggatgcggttactaaaacagtcaaatgcaacatgaggctccaggcagagtagtgggcaacatctcccatgttgcagcagtcagagcacacttcgagtactgtaaaaagacacagacaagccagaacacatttagagaatggccaaggtgtggaaggaaccagaaaccatgccattatgcaactgttgaaggaagtgcctgttttaccttgtgaagagaagactctagaggaagaagtagcatgaaaaccgctggcaaatttgtaaagatctgaagtgtggaaaagaattattctgcttggtcactggggatacaaggatatctgagtgggagtttaaaggcgggggatgtgagctttaaatgggataagaacattctagtaaccagaaatgcccaaagatagaatgcacagtctggagagccagtgaatatctcacaaatggagacacttgaaactaggatggggatgctgttgtaggaattccagcagacaagtggttgttggttccttccccaactttgtagggttataactagggatgttcctgcgttttctgcttggaggatctgcaagacacctcagggcaggaaatggcattaaatgcagaacagagctagtggctgaaaagcaaaaagccatcaggatctctgagtagtgaaggaaccagagaacatgcaggcaatgtccatcattctgacgcaatcagcagcataatcatcttcccccaggaacatcttgaccagggaatgtgtcagtgtggtgaatttcaacagtggaaagagaaactgctaaatctaagaactttaatttttatagattatgatctcatctctacaattttgaatttcatgctcaataaaagttccttactctctttttttttttttgagacggagtctcgctctgtcgcccaggctggagtgcagtggcgcgatctcggctcacttcaagctcagcctcccgggttcacgccattctcctgcctcagcctccccagtagctgggactacaggcgcccgccacgacgcccggctaattttttgtatttttagtagagacggggtttcaccgtgttagccaggatggtgttgatctcctgacctcgtgatccgcccgcctcagcctcccaaagaaaagtccctcactcttaaagttgcctcctccttcccagggctggcttcatgggcatgcaaccctggagagtctcacaggccctgcggtgggaggagccccatgcttggtttaacgctctgccattgccatcttaaaattcttaatttaattttttttcttttttttgaggtggagtctcgctctgtcgcccaggctggagtgcaatggcacaatcttggctcactgcaacctccgcctcccaggttcaagcgattctcctgcctcagcctctggagtagctgggattacaggcaggagtaaccacgctcggctaatttttgcatttttagtagagatgggggtttcaccatgttggccaggctggtctagaactcctgacctcaggtgatctgcccacctgggcctcctaaagtgctgggattacaggcatgagccaccaggcccggccttaaaattcttaataatgtaacaaagggtctcacgtttgcattttgcagtggactctgcaagatttgtagctttggaccacgtttctctttgcattcagataccttcttttttgccttatttgctcatgcagacccggaacaaatacggaattgcggtgggtaaatgtggtgcagaaagtgaacaactgggtttgtcctgtcactttaggcttttccctgctgtcccagcttcatgtcacttacttgctattagatttgggagttcattagcttcattttcctgatgtataaataggaataatagtaacagcctctttggcttttgtaggaagtaaatgacatgaagcgtataaacaaatactgcatgacaataaatatttgtccttatttgttgaggacatccaaaggacattcaggggcaaaagtaatccaagagtcaagactgaatgcctagtgcgggaaaagacacacaagacaacatttaggggagctggtacagaaatgacttcccaggaaggaagtctgtaccccgctggctgagccatccttcccgggcctaggcacccttgtcagcgcaatgagcaagggagagaaggcaggctgcagtgcagccctcagaagggccagagcactccctggcttcagtccttcgctccaagccctgtgtggagtgggctgtggcttggtaactaaatgctacttcaggtcaagagcaggggatatatctgggcagttctagagcattctaaactatctggacactaactggacagtggacggtttgtgtttaatccaggagaaagtggcatggcagaaggttcatttctataattcaggacagacacaatgaagaacaagggcagcgtttgaggtcagaagtcctcatttacgggggtcgaatacgaatgatctctcctaatttttccttcttccccaactcagatggatgttacatccctgcttaacaacaaaaaaagaccccccgccccgcaaaatccacactgaccaccccctttaacaaaacaaaaccaaaaacaaacaaaaatataagaaagaaacaaaacccaagcccagaaccctgctttcaagaagaagtaaatgggttggccgcttctttgccaggtcctgcgccttgctcctttggttcgttctaaagatagaaattccaggttgctcgtgcctgcttttgacgttgggggttaaaaaatgaggttttgctgtctcaacaagcaaagaaaatcctatttcctttaagcttcactcgttctcattctcttccagaaacgcctgccccacctctccaaaccgagagaaaaaacgaaatgcggataaaaacgcaccctagcagcagtcctttatacgacacccccgggaggcctgcggggtcggatgattcaagctcacggggacgagcaggagcgctctcgacttttctagagcctcagcgtcctaggactcacctttccctgatcctgcaccgtccctctcctggccccagactctccctcccactgttcacgaagcccaggtgggccgtcggccggggagcggagggggcgcgtggggtgcaggcggcgccaagggcgcgtgcacctgtgggcgcggggcgcgagggcccctcccggcgcgagcgggcgcagttccccggcggcgccgctaggggtctctctcgggtgccgagcggggtgggccggatcagctgactcgcctggctctgagccccgccgccgcgctcgggctccgtcagtttcctcggcagcggtaggcgagagcacgcggaggagcgtgcgcgggggccccgggagacggcggcggtggcggcgcgggcagagcaaggacgcggcggatcccactcgcacagcagcgcactcggtgccccgcgcagggtcgcgatgctgcccggtttggcactgctcctgctggccgcctggacggctcgggcgctggaggtgggtgccgcgcctcggaaggcggggggaggctgcacggtggggacgcgataccccccaagaccttaacccaagtctttaatgcagagaagccgggggtccgtcaatgggacccctctcctctccgcccccgcttgcggacgtccagcgcatccccgctttcggcccagccctgccccagggagtcgcgctccggcccgctgagagggagcgggcgaggcgctggtctccctggttccgcgccagcccggggcgagaagggtagggggcgaccctgagcccagaccccgacttagtccctgccttggaagcgggggtcgggggaggcgagagacattcagacaggggggaagggggaaggagcacgtggggaaaaccgaaaacgcagcgtccctaaagccagtccttcgctcttgaatcgttgccctttcctttctcttgggccctggggaggaggaggaggagtcgggacagcccaggaagctaggagcccctcgcttttccctgcgttctccgcctcgtttcaccttcctctctcacccccatcccccttccttgctccaacctcttttcgcggctgctggcggcggcagcctgggtgcgaccctagcccgagccggcgtcggggtcgcgcaccgccttccacaggcaaactttgtgcatgtccgcgtctcccttttgtgtaacttgcgagaaatgggaggggtcggagacccatagccaccccgcgccttccccaagtctggacgtcccgggagttcgctcgcaccctaagctctgtctgagaggcagaaggtccgcgggaacaaaagccgcgacaccccgccctcgccgtgggccgagccgcgttagtctcagtgcgccaccgaggctcccgcccggctcccttcccggggctgcgcgtccgcctgggagggggcagagacgctgccggggcttctggcggagcctcggggcccctctgcttcccaccctcggatcacctccgaggcttaattctgtgctgggctgtaaagtccttggcggggaggaaataaggcggagagtgggatgtgcgtctggaaagggcagtggcggatggtggggaggcacgggctctgtcctgtgcatccaaggaggcgtttgtctgattaaggcgcggcctcttccctggcagctctggggactctggtttagttcccctgggggcacaggatgctggggagggtccgaagggtcttttttttagggtgcagataaaaggatcgaattgagtgaagattaagacggagaagatggcgcctctgcagtgcagcaaagaaaagctgtgtggaggctgcagcctagtgaaatccacccaccactaggtgtataacaagtcttccccattcatccaactctcgaacattcagctaacgcctgtgcacaatgactgtttttctttacatctgaagatgcttagaagttgtttgcatgacagttgggccagaggaggctgtatttcacttcggacttcggttgggttcctgtttggcatcttaacatttgcaaccttccttacccgtttttcccctcttttcccccagcctcctagtaattttccaaaagaaaaaaagcaatttccgggcagatgttttcctgtaattccactgaggctgtacagactatcacaccattagttttttagtttctaatttgcaaggtcattgaacttttttctcttctgatttttacccacaagtggctcaggaatcaccttagggctagttaagacaggttgttttaagagttaaagaatttcgttttccatgttttaaaaaaatgcacttaactaagagaattctgatttctctcatgacttacttacatttatttgtagaattattccagttttcccgaatggtcttactacagattaaaaaccatacatttaaggaattaaaagcatatgataaccgtatttttgaagcttttgtcaaaacttaaatatgtaactttgttgagcaatatttctttctgtataaaaagaggaagcatgtaggcagattcgaatttagtttttggtctgtttaattgcattaatatgctctttctgccatcttttgggaccttttcagtagctattgttaactcctttaaagggtggaggtgagattcacattatgccattttgcgaagtgttggtagaagggtaggtaattcagtctactgaggtttgagggtggtttatctggttctctctgtgtccactgaaaagatgtaattacgagttgactgtcttttatagagcttagaaaataggtctgctgcaggtggctgtagaaaagaaatgaataagggcaatgataatggggccttggctatcgggggaaacatggttattatctgggttgatgattttggctggtatgttgatagaggtgtgagtttaacaaaccctaatctatatgatgtttcactaccctaatatttatttatttatttatttttaaatctagcttcctcttaagttttatttccctctgttgagggtttaacctagtcacaatcatcttacctttgtggtagtgctaatttatagtttatggaaacctgctgctactgactagtacctcgctaaaggtagaagccgacacacagaatagtaaagctcaggtttgatggtgatctgtaaggagtcacggttcttgctaatcgatgagaaaccatgataactggcagactgcagaagcttttctcttgtcaccggaaccagcagaggctcctgaacgacatttgcaaggctattagtactgcggagaagttactagatggaataatactggtcctgactgaggaaatgaaaaggaacatgcaagttcacgaggttaaatgaggaatggctgattcaaaaaaattaaaaagaaataacgtgatcaacaatattggtttgaaggaatgggagaggttgtctttatgttaagtcttgttgctagaggatctctattttatgttactgttttttgcatactagagtcttctacagatatttgtatgaatgttgtcagtcattctggaaataagcatagctattacttgcatttcacgtggccactaaactatcagtgagaagtgcattaaattcagtagaaatgtacattgtttctgcaaattgtattaccttgagaatcttacaaagcatctttcattaatacatttcttttaaaatctctatcaattacaaatgtaaagataaacctgtacagatgcattttaaatttaaagcttccagaatgtaaggtttagttcgactgcatacctcattacctccccttccctcctccctccccttactcccaggaagtttgcagggtaaataaaacatgcacatgataataaaacaaagtggaatgtactaaaataccaaaaggaaaatacagattaggtatactgagtaaatatgttacagagaaaacttcctgtatttaaaaagtaaggaacaatgggatgagatcatagataatcctggagcatttcctggtagtaaatttccagccaggtttatatcccaggtctggggattggaggttaagtttctgcatatacaatatttgtttacattcctctctgcctctaccagacagacagacagacacacacacacacacacacacacaccctctgtctctttctctctctttctctctctctctctctctctctctctctctctcacttgagtgacagatgctggtgcagggtattctcaacaggagtagggaatttgaaataaggagttgagaggtcaaaggtaaggggctgaatgcaggaccagagagcttcagtagcatcttgatgggcagagtatgagatgaacagtggcaacgaggaggatagggaaaaatcacattttctgtttgtgttttgtttttgtctggtggttttcaacctctctctgtttcacttgactatgcttgattatgaaatcttttttttttctttttttaatttaaagatctcaactggctttgttgtgattctacattcaggcaacactattctgtaaaatagtataaatgttccgatgagttgaacagaggagattggctttgtagacagaaaagggctgaagaaaacagaaataaaaaaatcttttccttttcatagtgagagctcagatgcaaatgtatggagtggggatggatgggaaatgccgtcttttgcaaacccttggaaacgctgtcaccctgtgggtctcacagccagtgtacagataacaccctcatctgtacacagaagacagaaggtggcaggggaaggaatgagcacaccccagaatgagtagcaagtttaatcaataaaatatgtatttctttttttattgttgtataagaagaaaagcagacagaactcaaaccctgaagctgattttgcaagtgaaaagcttagtaaagggggaaatgttatgtaactattttttcagtttagtgtggatggcttaagaaataatcattactgtgaggacactagtatttttcttggaaaaaaaagtttggcaaattttcctctttagattaatcttggttatagattattattatgcttgagtggtacctcttcagaagtagaaatctggcaaaaactggagtacaatgattgctctaggaataaattcacatatttaaatttaaaagcctggatatgtgcatcaattaatagctttatgaaacagggatgcttagtagattagctagctgagtattcagagagggccacagaagtctcaggttcacatgtattaaatctgctgaaatagaaacctaagagatcattttatttaggtttattttgtgtggctacatgttgaagaaacatgcaatagagatttagcttgaaccttgcgagactcacagtatcttacgaaagaagatagttaaaatggggaagatgagaggtttttaaaaatgtcacctctgtagaacgaaccagagttgttctcaatttataatgttgaatttgatgccaggcgtgatgttaggccaataacactgagtcattgagtgtttctcaggtatgtagagaaggcagcattgcacactaatcaggagagtttagaccagggcaggaatgcatgggcataaattctgtctttgtttcttttgagctagtgaccatgggcaagtttctgtgcctcagttttttcctttgtaaaatgggatgagtacttctagttattgaggatcgaattaatatctttgttaaatgcttgaaacagtgtgtgagttaatatatatgtaacctgatggcatagcataagcactgtgtgttagttgctgctatgtatggtgatgatgttgatgtacaatgggtatatgtaagtttcctgcatagttgaaagttaaaaatctagatgatgtttcacttattgacaaattacttattggccaattaagactattgcaggaaattgacagattgttgtctatgagtttgatctaaatttaaaaagcacatggtatctcagatacaatttttagaatacatgttataaaatttcatttattaaatatgtattgtgtatttcaattggttttttgaaaaatgaaaataattcatgctcattgaaaaatttaaaacagtacagaaatgtgcaaaaagcataagcattttttacacaaatgggaaatacctagtttttttttttctttttttccacataacatggatgtagaccttttttttttttttttgagacagaatctccctctgtcacccaggctggagtgcagtggcgcgatctcggctcactgcaacctccgcctcctgggttcaagcgattctcctgcctcagcctcctgagtagctgggactatgggcactcgccaccatgcccagctaatttttgtattttttaagtagagatggggtttcaccatgttggccaggctggtctcaaactcctgacctcaagtgatctgcccacctcggcctcccagagacctattttttaatgttgtacacactggcagcttgccacagatgtctaatattgagcaagtttatacactggcttgattattaactattagttggctatcagctatgtgcaaggaactgtgaacagacttggtttagttttcagtagaatctttgctagcaaaacgaataaacaggctttgccaatctgggtagaaatggaagatttcaaatgccagcaaaagaattttggtcctaatatggaagcttgaagttatgttcacccaaggacagggaaaccaaaaagcagattgcttgagaatgcggcatttctctaggaaatcagtttcaaaataaaatgaattttttgttttgttttgtttttgagacggagtctcgccctgtcgcccaagctggaatgcagtggtgcgatctcagctcactgcaatctccgcctctcaggttcaagcgattctcctgcctcagcctcccgagtagctgggattacaggcgtgtgccactatgcccagctaatttttatatttttagtagagacggggtttcactatgttggtcaggctggtctcaaactcttgacctcgtgatccgcctgcctcggcctcccaaagtgctgcgattacaggcgtgagccaccgcgcccagctgcagtaaagtgaatttgtgtaaccagccatgttatggctgttacatctttaaaactttatagtgatctgctgtttaattgaaattatatattttttttaaaaatcagcatatgttgctcaaaaataaaaggtttttagcttcaaaagcaggccaaggatatttgaaagccttgagtgtatgaaactggtgatactgtggttaaatgatgatgaacgcagggaaaaatcaagaagcagagtcccaaagaattcacatgggtttttgttaaccagctcatgtaattataattgtcctgtccaactaaagacaagaagacaagaagtgggttcacatacgaggatgtgtaatgacagaagccatatttgtgataaacatcctgattacagtagatacagtgaggagtgattaagatggttccagaagcaggagtggagggttcatgagcagggatgaggaataaataggacaaacattttggaaaagggaaaagatgaataagcctgttttgtaaattaatggatcctgatgaatgaagtgcagtgattccttaaggtcttattaatgatggaccccaaacagtgtttgaatctcttaatttccagatggttcctttttttcttcacaaagtcagaaggttttcttatgagaaatttgattcaacaagaataattgtcacttcttttgttttttggtgatttttttttttttttttttttttttttttgagactgagttttactgtgtcacccaggctggagtgcagtggcgtgtcttggcttactgcaacctctgcctcccgggttcaagcaattctcatgcctcagcctcctgaatagctgggtttacaggcatgtgccaccacgcctggctaatttttgtttttgttttttttttttttagtagagacagggtttcactacattggccagggtggtctcgaactcctgacttcaagtgatccacccacctaggcctcccaaagtgctgggataacaggtgtgagccactgcacctggccaattttttggtgattttgataggaatttttttttttgcctgatgctttttttgagagaatctaataatttgtctcttatttaataatttggctttcattagcttccagaaagccacatactgtcttcattgaaaaatgtaaggcatcctagatgatacagactgataaattacttttcagccataaaagatacttatgagaataagagatctgttgcataaagaaaagtcatttgtgttaagtgaagaaatgcattattactcttgctgctttgctaaatttcaaacattgaataactaatatattttgaccccctggagatattttacaggaagaaaaatgagaggtttaatcctactgttgagatagacttaacgtgttttagacctgcccctcatcccaagttactacaaactcatttgtttagtttttccttgtctgtgtgctcgttatttcacagtaaaattagtgaggcaacataaattttatttttaagagaaagtaaagaaaatggctttatccattaaaggtttattcatcttaaaaaaggacttgttatatctactcctactattggatgaattttcaaaagcatattgatactgtgtttggttttgtttgttttcgggacaagtcctcactctgtcacccaggctgaagtgcagtggtgtgatctgtagccgtggcctcctgggctgaagccatcttcctgccccagcctccagagtagctgggactacaggcatgtgccaccacatctgactaatttcttaaatgttttgtagagatggggtccccactatgttgcccaggctgatcttgaactcctgggctcaagcgatcctcctgcctcgaccttccaaagtgctagattacaggtgtgagctattgtgcctggccaatgttgtttttataaatatcattactcagttattttgtttataattgaattgataggctcatagaataaagatggataagcactgtttcttaactgtatttattgatttttttatctttcaaaaaaaaaatcctcatctacttcaaagattaagcctttaaaaccgatgcaaagtttttgaagtcttagcttaagtcttcagagactaacattaaaacccatcatatgaaaagtgatatgtagtagcaaatattctccatcctgatgctctcaattgcttattatggtttaacacaaatataattttgtcattacagtaaattagtttgaggatataactgaagagtacctaagaaactcccatagaaatgtgaaaatatgcagactaattattctaagaataattaatcatagatacttacatattaaattgattagcaatttaaaattaaagccaaatttctgtggaaattagcttattttcatacacaaagaaacctagattcttaggggtacaaccaagaaagggccactccttcatttcacaaatattttcgaggtccttgcccccaagagggtagacagaataaaaaggaggaaggaagtgacttggaaaaaattaagttgggtaaggaatataagagaatgctacgtagaaggatgtgtgttgtgaatgcaatagtttctgtagtattgtcaaagttctctgatcatttcagtatgtgaaggtaaacttagataactgggggaaggaactatatatttactacattgtaaaagaataattgtagacagaagatctactttgggtgattaaatgttgaaaacaagtggtgggagagagaagttagtgttgattgtgatcacacacttttctatacagtaatttgtttgatcactcatgataatgccttacattttgtatgtactaaataaatgagttctctagaaattctatgttgtggtgataaagaattacgttcagattgaagattcgaacagctgtgcaaccttctcaacatttaagaaactgcgaacaagcatagaaagaagattaaagccttttaaataagattcttttttttcagcctctttttggaacattttattgtgaaaaggtttcataaatactgtcaatacatcacgttcagtcatttgcaattgtatttcaaaaattcagttggcctgcaaaaagaaaaaatgcctcatttttgaaatatttcatccatgccctgattgattgggacactttcaatagagggtgcctagacataattttgtgtgaagaagttagtagagtttggaaagaaaatgtgtattggaattaaatttagtggcatgaaaatgaaaatttctctgtcattgtctttttttttggctccttttttggccattttacagctagtgtttagtgtgacaaggatcaaaattggccctttaaaaaaatatattgaattctattacctctgttatctaaaagaattgtatttttcaatttgaagagcttgaagccaatactactatataccattaacttgacaggaattgaaaatctaattgaggtcattatgattagccttgtatcttgctagtattttctcaatcttattttgaatgttttgtgtcaagtgttaaatcctcttataccacagaatccagaaaatttaaatgcaacagaagtaaaacgaatataaaaattctatggttgttgtggaggggcgttcttggctaacccatagggtgtttgaatgtaaaggcagcttacagaactgctgctagttgaattgtggagggtttcacttttaagagtacatttgagacaaaattgcaattttggaatcacttattcctgcttgttcagtgaaataggagaggggggaattcctgagggaagctgggagatttccaggtgatgatagagtagccatgtgagtatttggctgaaacagagtagaagccacctctgtctgttggacagaggtggccttaacactgagtatcaatcagcatggccattagagctgtccaggacaaacataatgaatgttgtggtggcagagagggtatacttaaatgaacaaaattggaggctgactttccttgtttcttggtagttcctttcttcgtatttgctatttggatatttcacttcacttttgtgagctagactcaaaggttaaatttatatcattgtgaattttctgggtcatattgtagggacacagatgggaagcatcccttcagtttattgagagtatttcttatgcgcatgtgtttttaattgtatttattgatttaataaatagccgatgagatgagaaaaaaatattagtgtcttgttgttgcagagaaaaagacattggatgcattcttagaatttattatcacatgcgaagttatttagatttacaaagcaatctgacatgttgacttcattgctcgtttgctcatttctatcagaggttgaacacaaagccaagcctaagcccgtgattcttctgtgtgcagatgagggggaaggtttaatgcagaatgtttagctgaatatttggattgtgcattccccttttatgtctctactgcaagttttctcagggcatttgtgattgacttctgtgatgttgacatttatttggagttagatgtttaaaaaattactaatttatggcctggtgcggtggcttacacctgtaatcccagcactttgggaggccaaggcgggtggatcacgaggtcaggagatccagtccatcctggctaacatggtgaaaccctgtctccactaaaaatacaacaaattaaccgggcgtggtgacaggcacctgtagtcccagctactcgggaggctgaggcaggagaatggtgtgaacctgggaggcagagcttgcagtgagccatcgtgccactgcactccagcctaggcaacagagcgagactccgtctcaaaaaaaaaaaaaatttactatcttattgtttctctcattttgaatttgtgaaattattattcattttatggacatactgcatggattctgtgtttcagttatgacaggagatctagaatctgggtggggctgtgagtaaatagaaaggtaactcagtctgtgccttgaggaattccgcagtccagtggaggaagaaagagacggagaaataattaggtacagtgtgccaaaggctataatagaggaggtacaaactcttcccagagaaggcaggcagaatttgaactaggtttcaaggatgtgtgaaggtgaactggggtggggagggcttcccagacagaaaaaacagcgagggtgtagagtttcaaagggggaagcccaggggtataataagtgaaggagacagtgtgaaattataaattttggatgcccttaatgagtttgaacttcattttcttagaaatggagtacttttaaatgttcctaaaatggggacgaggcattgatattcatggttcagttaggtttaggagcttttgtagaagtccttttcaaggtctgcttaatctcatgggccagatagtgacacctcgatgcaagggagcatgtaaatgtgctctattagctgggagcattgctatcagaaattacatttccggctctcttcttaagggtaaaggagaggtaggatattgagtggcaactggcattctgggatgtagaagaaatacagtaccataaagggatagaggaaaatgggtagacttaacgttctgaaccaaagctaagattctccgtgagcgattagagtaggcttttgggatttgcttaccttctcttatctgctagccagccacacaggaagcacatctttgtggagtgacagaggaggaggtaggaaatgctttctcatttttatggtagaaacatccaagagctgagccttcattctggctgagagaactctagatggttcagacttgcattcctgggaaggccttccagctagagtgatggaacaaagcaatgatttctgtggccctgtgtggacagcagtggcagtcagtttactctccctgttggttaactgtctttcgtttgatctagagacttcctcaaaacaattttgttgtgcttgttctttgaaagcaacagcagacaaaacaagctttgaggtttttagaaaagagcttgacactgagcacctcttttgagctagatctgtctgtcatgctgaacctgttttctgtggctgcgtagcttttcaaatctgtttatgcttgctggtgttattgaaacagaatgggaagatctatgcaaaaaggaacattgatcttaataaatttatgtcagtaagaatgggactgccattttaaaatttattttaattccttacctattttcttgttcaattattctaaaagtgattaaatgaagatacgtcacagaaagtatgctttgaaatcaagatgtggggaaaacctgtagttctgagtaggcctgatagaatcatcattgttagagtatttggaggttttgtagtagggattttgtcttcacttaaatatttagttgaaatatgttccaatagtttgacacattacagaatctgtctgaaagaaatgtctaaaatatgattcctcagaagctgctcttggttttactttctgctgttggttttactttctaacatttcattttgatcccgcagttttaagagtaatcaaaaaggccgggcacggtggctcacacctgtaatcccagcacttcgggagactgaggtgggtggatcacttgaggtcaggagttcaaggccagcctggccaacatggtgaaaccccgtctctacaaaaaatacaaaaatcagccgagcgtggtggtgcatgcctgtagtctcagttactcgggaggctgagacaggagaatcccttgaacccaggaggcggaggttgcagtgagccgagatcataccactgcattccagcctgggcaacagagccagactctgtctcaaaaaaaaagagtaatcaaaaagctacattatttaaatcttggcatgtctttaaaaaatgttaaactgtcaggaaaattatcacttctggataccaccttcagaaaaacacatgaaaatttgtgcatgtctcaaatagttgttaatttatgaaaaattagaaagagtgtttgaatgtatatttctgtcatattatattgctcatatttttaaattatactttttttcacccgtgaagcccatatagttaagtttgaaaattttaattatattagaatttgaaaattaaataaatctcctttaattcatgcataattttctaatagtcatatagtttgtattatataatttgagaaacttggttctaaaaaaattgtctgccaaagaatgtatatttctgaattctgttctgctttcatacatctgaaaatatttgagctatcataactggctatgcttcaaacccagtctgaaatgggtgacctttgctggctttggattgcagagctgggggctgttgtttgctttatctgatttaaaatagtcagtagtttattttgcaggcagttagatgtatacctttgcataaaatcattgaactgaaaaggttggcactccaagaatacgttgtgagaaaagagaacttgagtactcactctcgactcacctgaatcttattaatattttattgattaatatctgttgtatttttaagtaaataagctctctagaaactatctctgcttctttgttcatttaaaatatattaaacaaattgatacagattgcaaaaattagttgcaacgttcctagttagatatcaatgaaataaaaatggtctattcatacgagttcattttagttattcctactaatatcaaatgtgttttaaaaaatgggagattataatctttttatgaagtaagataaattattactttgtatatttaattcaaagaaaacaaaaaggccacaagtgcctgcataaaggcacatccacttaggattattgttaaggcctacagttgataattaggattcaggcatagcataaatgaagtggtatctttttttttttttttttttttgagacgaagtctcgctctgttgtccaggctggagtgcagtggcacggtctcggctcactgcaagctctgcctccctcctgggttcacgccattctcctccctcagcctcccgagtagctgggactacaggcttccgccaccactcccagctacgtttttttgtatttttggtagagacagggtttcaccatgttagccaggatggtcttgatctcctgacctcatgatccacccgtctcggcctcccaaagtgctgggattacaggcatgagccaccgcgcccagccagatatcaattatttttagacccaatgatatttgctgttgatttattgttggtgcacaaaataagaaaacaaaagcatggttttaaaacagccctttacacatttaatatggaaatggtaacctacaggtctgtattccatacagattcctgggctcattttatctgtgaattcctctgggcgtcatgcatgcccaggactgactttaaagcagaattatccagtagaggtataataggaccgttagatctaatttaaagttttcaagtagccacataaaaaaataagcaggcgaaattaattttagtctgtcactaaattcaaaatgttatttcaacagggggtcaatataaaagctatttatgaaatacattattttttcatattatgtcttcaaaatgttcacatttcacatatttattttttattttattattactatttttttgagacggagtctcactcagtcggttgcccaggctagagtgcaatctagcttgctcattgcaatcttggctcattgcaacctccacctcctgggttcaagcagttttcctgcctcagcctcctgagtagctgggattacaggcgtgtgccatcacacccagctaatttttttatttttggtagggatgagatttcaccatgttggccaggctggtcttgaactcctgacctcaagtgacttgccgctttggcctcccaaagtgccgggattacagttgtgagccaccgcacctgattacatatttcacatattttaattcagaccagctgcatgtcaagtacttagtagccacagatggctagtggttactgtattggacagtgcagctctaggagagtctcttcaacctgcagctgtctaggaagagaatcatagtttctggaacaggtagaatctataagacctcctttttaagcttctccactttacagatgaagaaagtaatatctggagatgttgagttgttcaaaatcacccacattttaaggatcaagagcccagtccctgttctctaacttctaatctctttcttcatcactttttctgcttcatgttgctgcatcccctttagttactaaggtactaacgttaggttgttgctatcagttaaatattaagccaggagctttaagacaatctggcccacttgaaggcatggcctgatttggacaaaacttgtggggtaggatgaatagagttaccaggcatatcttcaacctctctgtggactagtattatacatatatgagatgatgtagggtccagtgatcagttcatctttttctattgtgagcactgttggaataggaatggggggaccttttgggacccaggatatgtgattctgaaccctgaaatgtcagatgcccactaaaaggaaggggagagatggacctgtcattaccttacacattttattgtctgtatgggtatgtaaacatgtacagattataaggaattgcacttcatttctgggcttctggaaacacaggtattaagatttcatttacctccccttgttttggaaggcttattgtgtgtgtgcccatagttcttacccagttacacttaaagtatgatactttttgacagcttaagcctattgcattcctggcatgtaaaatagttattttcagaatgtaagcaaatgtggaaagcttactgcctgacatggagggttggagaagtgggattggtgttcttttgttgtaaactcatttttgtgaaatatttgctttacaacgtgaagcatgcatgatggatgaacttttagaattgaaagttatttttcatttcattcctgaaatatttaccagcatggatgttgactgagtgctttgaagagtttgcttagtcatataacttaggttttatgattttagatttaattaaacttaaagttttcctgtttgatcctcaggacttctcatctgtggcaaggctttactcacaaaggaaatatcaaccttgaagttaagcatgccctgtgtttctttatattctgatgaaaacgattgaagtttgccagtgctgtgtctgggacaatgcttagaggattcatggcttgtaggaatgagttaaaagtacaaggatattggctggcatggtgactgtcgcctgtagtcccaaaactttgagagtctgaggtcagaggattgcttgagctcaggagtttgagacaagcctgggcagcataaggagatcccatctctatgttttttaaaaaagtgaaaaacaacaacaacaacaaggtacaggggtatctgcgtttccttaggcagctgtcttatatacctttaaccttaaaaaaatccaccatttttaaaacagtgttttctgttgtttttcttagtaaatataaacaataggaactgaagtttagggcttaaaatttttgagagaataatttttatttcagtagcttttggggtacaagtggtttcttgttacttagttgaattacgtagtggtgaattctgagattttagtgcacttaagtagggtaccttgtacctaatgtctagtttttcttttaatccctagtcccctattaccctcctcctcgtgagtctctaaagtccaatatgtccctctgtgtgcctttgcttattcctaacttagttcccacttataagagagaacatacggtttttggttttccaattcctgaattactttacttagaataatggcctccagctctatccaagttgttgcaaaagacattattttgttccttgtaatggctgagtagtagtccctgatatatatatgccacatcttctttatcctctcattagtcagtggccacttaggttggttctgcatctttgcatttgtgaattgtggtcctgtaaacatatgtgtacaagtgtctttttcatacaatgacttcttttcctccgggtagatacccagtattaagattgctggatcaaatggtagatctacttttaactctttaggaaatctccataatgttttccatagaggtggtactagtttacattctgagagaataatttttgtaaaattatgtttaagctagatttggaattgggaaagaattacattctttataggaagcttttgaaaaatatatttaaaaatatataaaaatatgcataatcctaccacccacaaatgtctgtattattatgtcatttctaaaccatttttgagattatgctatagattacgttttagatcctacattttatttcttaacattaaatctcatactattttaagttctttgtacatgtaatgtttactgaatgggtaaatctgtttagggaaactggagctatgtagttgtggacttgtgcttttgttttgttttgttttgtttgtttgtacatttgctttttagaaatgtctattcagatccttggcccatttttttttttttttttttttttgagatggagtcttgctctgtcgcccagactggagtgcagtggcgcgatctcggctcactgcaagctccgcctcccgggttcacgccattctcccgcctcagcctcccgagtagctgggactacgggcgcccgccaccacgcccggctaattttgtttttgttttgtatttttagtagagatagggtttcaccatgttggccaggatggtcttgatctcctgacctcgtgatccccccgcctcggcctcccaaagtgctgggattacaggcgtgagccaccgtgcccagacagacatgtgcttttttatttggcatttctagcctgaacataggctggaagtagtgacttagagagggattgtttgccaaatatcaggtaatattttaattatttattatttattgtaatgctgtgaatcaggagtccctaacccctgggccatggactggtaccggtctgtggcgtgttaggagctttgctgcacagcagtaggtgagcaatgggtgagtgagtgttgctgcctgagccctgcctcttgtcacatcagcagggcattagatgctcataggagcgcaaaccctattgtgaaccgcatgtaagaaagtgagagctgcgttgcacactccttattagaatctaatgcctgatgatctgaggtggagcagtttcatcccgaaaccaaaccacaaaattgtctttcatcaaaccattccctggtgccagaaaggctggggaccactgctataaattgctgctgtcaagtagtgttacgcatggtggtctttaacataaaaaaaaaaggtaatgaacgtacaccacacagattagcaaaaataaggaaaggctgatctagtagttcaaacaagcaatcctcttatttaatggttctgtgattgctcgtgtaggcagaagcttaactgtaagttgttgcatttgacaggcaaatgtagctggagctggaatgtagatattagtgaaattgtgatttcagtttactggagccattcagtgggagcatgaagtgggttacatgattacacggatataaataaagcgtcctccttgccacttcactgctgttaaagtctctcctgatgttatgtggtgaaaaacaagtcaaaaacattaattctgtcaagtttccaaagatataagaatctttgaccagaaaagagacggtatttatcttcaaatttaacaaattgtgatgaaatgctgctgttacagaacctagtgtaaggtcgtggagtccattcagccagacacatgtaattttgattattaactgccgtttctgtggtcagtcggccagttttatatatttcacattataggtatttggagcaaagacagtgttgtttattgtttactttaaaaaaatacaatactgtaactacataatgagtaaatgttgatactgttgaaaactaataaaaacaaattcttacactatcaacatcacagaaattctaattgtaagaaaatattgatataatatggaaatccgttcatttatttggtgcattaattgaacaccaacactatgccaagcattgggatacaaccatgaaagaggccagcttcctgatctcacagagcttgtactttgttgggtggggcagagagcaaatcagtcaatctgtctgtctgtctgtctatctatctgtctatctatctgtctatctagatgtcaatcagtatactctgtgccacttggtggtcagtgctatgaagaaaaattaagccagtgaggagctggatagagacacagtctggaagggtatgaaggggatcagaatatgctacccccaaatatgccatttcagcaaagtactaatttgagctgaagacaatcgagaaatagcagacccaggacaagctttaccccctttttataaaaattttgctgtgtgaaggtatcctccttcccctctccatccctggagagaccactagaggtggcaccatcgcctgcagaaacaaaccttattgaaataacccttatcttctattagtttcccccatatatttaccttaccacacttcccctggaagccctaatcccctctcctttgtcttgtgacttctccacagtttattgctctttgttaaaatggtgtgtatgctctcaggcctaactgcttcttttgggtttttgcttttctgtggagctccctcctctcccctccctcatgtaaaaataataacattaaataaaatttgtgttttttcccctgcgaatctgtctcgtcagtttaattggcaaggcctcatgtgctgaacctaacagggtagagaaaaaaggtttttttccccttttctacaagtattaaacctggagagaacaatacagtgtaaaggctgtgaggtgggagcatgctggggtgttggaagaagcacatgagcttacaaacattccatcaatttgcattcattccaaaaattgtatgcaatttttcagtgacgattcccattgatcaatcatttataaaaactaatggtgagggtcttccatactcagtttactcccttcttggaaaagaatgtacattttaatcaagatgatttcatgaaagacattctgtactccaaacatttaaaagagcgtttagagtatacagcaattcatcttttcttctgtattttaaaatttaagacagggagaattattgtattatacttagttcagatttggtggtggttttgttttttggttccagtgaaaagaaattgcatcagtaacctggcggtcaaccgtgccatattgtttgtgatttattagtctggaaaaaataactgtatttctggcatatgtaaaaatagtttgctgagaggcctccttggttgtggcaatagtaatactaattaccaggtactgtatgtagctcattctatgaaccaggccttgttgaaaagtgctttcacttaattttttcttttcagcagcctgtgaggtacctactgttatccccagctgggagggagctggccagtggactgggtttaaactatgttttcattgtctttactcttaaccacttatcttctctgcctccagcaaaataagtcaaagagttcagccagtgtttcttcttggactaagcagtcagcctcctaagtaagcaagccttggaatgcaattgattggtaagatactaaagtaatcagtaaggccctcagttcctggctgccagcttctttcaccctctcctgcaggaagttctgaatgctgatatctctacttggtgtcttctctccccctcccaattccattatttccctttttctcaatcccaagtgaaggaagttctgagtgtggatgttggagtcattcagaccttggatctgagtcacaactctttcaatttactagaaatatgactgcaagaaaatgatgtaagcttccctaaaccaatttccacatctacaaagtatctaaatagattgcttaggagaaaaattgaattaaattgaataaagtgcaaagcacagaacatggccaggagtaggccctggatgaatgagggaaaaatggttctgatttttatttttgagcctctttgtaacatttgttggccccttcagaataatccttagagttcatatcagccacccttcatccctcctgggatgggccaggggagaggcccagttgcctgtgacactgcttcgtttcacatttcactgctttagcatctcaacatttcattgataacatttttgatgcctgaaaacagaataacttatttgtaattctacatacattttgtttgtgatcaagttgttagagtttgaaatgagcctcatttccttgggttttgtccctccccatctgaccttcctcttctcagtgaaccctgaagaaaaaacactagcaaaggaatctcaagaatgttggttcgggacacagctctctccatctactctcctgccctagtcctgcccctccttgtgttttcagcggtgaccaggcactggtgacagccttggctgcttggaccagctggaggtagctgcaaaatgcctgcctgctagctttgaaaaatctctgccaacctcattgaaataattgtttaccacatatcagaggggactgggaagtgggtaattgagagatctttttgaaggggtttgtggcttctccacttgcagaggcttcctgaaatggtgggtaatgctcatgcctcagggagaatcaatatccttctcctaaaacctgctcacacgtagctctaagtattagacatgcatttttgttaacattttatcagtgcatttttctacctgtgtcatttggaccttagattcgggagaaaatcactgtgtatctttggtggtttcaggtggctcttaaatttcattaattcacaaaatctgaattgaatggaatagtctgttttgggaggtttttttgggggggttggggagggattggatttttcagtccttccaagagacttcaggttttttttttgatgttctgattagcccggtgtgtgtaaggccctatcaggtgttcgcctgtgtgatcctatcacacccacatcctgtagctgcatccaagtgctttgaggccgacttaatggggattaacttaacagttgctctgtgggaacagatgctctttgccgcttatttctaataaattgattgagccatttaaaagattttttttttcttttaagttacatcttcttaagaaactgtagacaataaagcaaaactaaaatacttgggtctaaaattagtgtattatatttaaaacactgggcttcagactgattatatcatgctcttttactgactttctagtcagatgcttatttataaaaataaagcttatataaagggcagcattcaaatgttacaccagtcggttttagcagtttgaccttccacagtagctaaatattttttacactgagagaagaattctttaacattatatgctatcagcatgtcaagtgaattctgagcttgcatgcaacagatgagaccctaggtggaaacataaaaacataccagtgtgaaagagaaaagcaggctctctgtctttgggaaggagttctgcagggaggggtgtttataagtgtagtagatacttaggaaaattaatacaattattataaaagtcatctgggaaaaaccattaggtaagaatagccaataaaaaaccagaagcaaaatgtaaagatatagaaattaaaactgcacatcccatgcatagataggtcaatggggcaaactggaagtctagaaataaagttgtgcatatattggaaattagtgcaagataaaagtgtctttttacatcagaaaggggaaagatggattatttagttaatggtgttgggttatctgactgtacatagaaggaaggtgggtaattatttacccagtaccaatactggattacctagtattatgtacccagtacagtttgtcagcaacaaaaggcaaacttttttattccatgaagtgttcttacaaatcagtaagaaatactaaatatgaacatcttcagagaaaaatgaacatttttgaaaacttattatgaaaagaattaaacatacacaagagagaatagtgcgctgaatgctcagcaatgatcagctctcacccagtcttgttttatctgtattcccctttctcaacctgctcaattctcttttccctcactgggttattttgaaataatttcaattctataattttatgtataaatatttcagtgtggatgtctaacagaatctctattagacgtggacaaaaaaggcaaagaattttatagtacacaggaaaaaatacacagccaataaacctatgaagatatgctcaatctcatagtcgtcagggaaatgcaaagtaaaacagtgatataacattgttttttaaaaccctgatgggcaaagactaaaaaggcttgccagattggcattttcatctactgtcaattgataacagatatttctttgcttggagtacagtggcacagtctggactcactgcaacctctgcctcccaggttcaagtgattctcctgcctcagcctcccgagtacctgggattacaggtgtgagccaccacgcctggctcattttttgtatttttagtagaagcagggtttcaccatgttggccaggctggtctcgaattcctgacctcaagtgatctgcccactgcaggcatgagccgctgcatgcagctggtacagaaattttttagatcagtcatttagaattttatgtacatatcccttgatctaggaattctagaaactaattagttcatagtatattgtataaatgcgcacagatgaggatattatgagagcattatttgtatcaactaagcaagcctttaaaaaactcttatacagtagaatattatgctgatacattaaaagtgggcataaccatactgatgtatagaaatatctaaaatcataccgatataagtgaaaacattcagaatgcaggcataatcacagattaaacagtaatttatataaaaaacagaaaatttatatgtgtattatgtcagtagcagattcaagtgaatctgacaaaatctgactctgggcaatgagaacattggaatggaggagaaggtagtacatatttactttgtatattatcaccttttgtactatttgagtctttttaactgtacgcagatactttagagcaggggtccccaacacccagccatggacaggtactggtccatggcctgctaggaaccgggccacacagcaggaggtgagtggcaggcaggtgagccagtgagcattactgcctgagtgctgcttcctggcagtagattctcacaggagcacaaaacctattgtgaactaaacatgggagggatccaggttgcctggtccagtccttgtgagaatctaactaatgtctgatgatctgaggtggaagagtttcatcccaaaaccatcccatcccatccagtctcatgccatcccacccccaacaccccatggataaatggtcttccacaaaaccagtccctggtgccaaaaaggttagagatcactgccttagaggctgctccctcttggcacatcttgaatgtaggactccttggttctgccattcctggtaggtagtcagccagcttttgatagttctccccagagacttcatcccacaggcaagccatcccattccacgtaaaacatctctaatgttaggaaggcacgtattttgatgtgatatctagaatcctcccagctgttcttcagaggaacattacttttataaagttgaaaagaacgttttattgtattataaaactaggtcatttcagtgaatttcatctattttcatgggtaactgattcttatatcaaaacttgcttttgaaagtactggaagcataaattattacttcaggcccatttgctttactttgttcagcacattgaacatcaaggagcaactccctcgatctaaaatttctagcattggtgcttgtaatatcatttttcaagttgacattaatgctatctttggaattctcatggtaagtcagaagaaagcagtttagtggaactgttctttctcccactgaattgtatactgagatctgttatattttctgcattttaacccagaaagttgttcaagagaattgaccatgataagacatctgtagcttattttgtatttttttaatggaaaattgtaactgacttttaaatttaagattgagtgtagcctttcccaaaccaatagctaatgtttttataactatttagtgtaggagattataataaaatccacattgcttaagatataaaatgtttgtgcagtaataggctgtataaaaacagtaaattgagattgtatcaggaataatgtattataaaccatatatgaaaccaggtactaacttggtattctgcatagctttatcagaaaggcagagcaaatactatctcaaaatgaagtataaacaaaatgaggttcagtgagtgatgtggtttggctccatccccacctggatctcatcttgaattgtagtccccataatccccatgtgtagtgggagggaccaggtggagataactgaatcatagaggcggtttcccccatcctgttctggtaatagtgagttagttctcacgagaactgatcactttataagggacttttccccccttttgcttggcacttcttcttcctgccaccatgtgaagaaggacgtgtttgcctccccgtctaccctaattgtaaggttcctgaggcctccccagccatgctgaactgtgagtcagttcaacctgtttcttttataaattactgagtcttggatatgtcttcattagcagcgtgagatcagattaatacagggaggctacataatttgacccaagtagcaataaacaataggggtgaggttgaaatccaggcccctggtacttatggccttaagctaagtgaaataagccagacacagaaaaacaaatactgcatgatttcatttatatgtggaacctaaaacactcaaactcatggaaacaagagtagaagggtggtgttaccagggtttggatgtgggggaagtgaggcgatgttggtcaaagggtgcaaacttgcagttatgagattaatacctaatgtacagcctagtgactagttaataatagtgaattgtacacttgaaaacgtctgcgagagtaaatgttaaatattcttaccacacagaacaaaaaaagtaactctgaggtgatggatatgttaattagcttgattgtgataatcatttcacagtgtatacatatatcaaaacatcacgttgtatacattgaatatacataatttttgtcaattatacttcagtaaagctagggaagaataaaagaagtgacctaaccaggacacctatctgtagctctatggtaaagccaaaagggataataacttttgattatcaaaacttcatcatcattattattttttaagactgggtcttgctatgttacttaggctggtctcaaactcctaggctaagtgatcctcctgccttggcctcccgacatattaggattataggcatgagccatcacacccagccagttttgaaggtatctttattacatttttttgtttaaatatttaatagtaagtgtttaacttgaagcatttttttctgccttaaaattgattttcccactcattttatggatcaaaactattatcagattttaattcccactccaccacattgtttataaaagttgacaattatggaaagtaaagtaatactgaatttttctaatgcctatctttgacatggaataaagattataaaatttcttataacttgaatgagtttttaaaaattggacatctttttataaaaatctagcattgaccatttcaacataagttttacttatctctgaaatacaggtagtacctatttttattaattttcttaagtgatgctgagtgacactatttttgttttttttcactttttctttactttttttttgagacaggatctcagtctgctgccaaggctagagtgcagtggtgtggtcttagctcactgcagcctcggcttcctgggctcaagcgatgctgccacctcagcctcctgagtagctgggactacaggtttgcaccaccaggcccagcagttttaaagattttttgtagagatggggtcttgctgtgttgcccagactggtcttgaactcctggcctcaggcgagcctccgacctctatctcccaaagtgctggaattatagacatcaaccaccgtgcctggccccagtgacactgtcttaattttgaatagggaagtatctaatggtattaaaatggtctggcagagaaggggatatgaggcttggtgaaaataagcacaggatgcaccatctttgagtaagtgttagtttctgcagtgagccagcagcaacattcttagcagagcctagaaagatcgagtgagggctgtgtggtggtgcagcctcttaagtctctctggttccacaacatgctcagattggtggctttgatattttctccatccaggacgcattgtgctaagcttagggaaggtccagtggatatttaccaagcctcttatactgccccgcatgttgccatgagacagcagcgttatcaccttaaatggtgcaaatactccttgtgcataccctacccctgagatctaacatctggattctggatactgtttcctattcttccatcttgctgcatggttcccaggttatgtatatagtgtggctaggcaccacacatggccctggctccttgcagccatacagaggtgacctaactggatgtaattgggtatgtaccgggtgttggctacctgtgcaggttgagggccttccacaggtctagcaaagcaattcattgcctttctgaatttttgaatgcttcatttgtgaaacccttgatgtaataactgttgatattatttctttttgaaaactccccttactcttccctgtttcttcatttgtaaactggaaccgatagaaaagtaccaaacttagggttgttgtgaggcgtaaaagaaataatacagcccagagaacatagtatatactcagcaagtatttattaatatgactactaagccagcattggtgattgattggctcatagtgtcttctatttgccagatgttttcagaggctctgttcatgttcatacccatgtttgtaaatgacagaatgtaaatttcttaatcctctgtcttctcctttagcatcagctcttgtccccaaagtaaaagaactcagtcatccagaacccagttttgtagatctatttttcaaaattgggcagttaatagaaaattaaaagcagtctagggaaaagcctttcctttgggtttgttgctttcttttctgtcataataagactgtgcccaaactgtagggaaaaatcaagaaactgtaaaatacatcatcagggtgtttatagtaaatgtaaaacgttaagtaacatttgagttaatctgtgcttgtacaaacctcagaagcttaaataatgaaccaatgacatataatttagaaagttttcattagactctttgcgttggtatttgcaatatcagatttgcatgtcatcattattagccttcctctattttgagtgttgactaggtgccaggcgtcatgttgagaaatttatgtgcttatttaattctcacactgactccatgagatagatactccattttacagatgaggaccccacatcataaccttttggccagaattacagttagtgttagaatttaaacctatgcagtctcattccaaatcctctgtctttactcctccagaatgctccattaaatgaattgtttcttataatccggttgttttaacgttggaaaagaacttgagaacatttagcccaaccaccctatgaagtttggcagtacttcttgccattctttcaatagataatttatttgagtttaagggagagtctatgaattaacactagtaccaaaactcccatgagaaaataatgtagacagcttttgttaaaaaagcagaatttttaaaggtgttcattcagttatcttcttgcctaacaagttcctgtgttgtgatagactttgaatttgttaaatatgaattggcttcctgattctagctgttttgccagaggcctgatttagagaagggattaaaccactggtcaaccttggatggaatttgggccagcagttccttctccacagcccctgacacttggctttgtgccaagaaaatcctacaaaaggaaattgatttactctacccaagacagagttccggaggctttggttgtccattgttagcttagaagttggcgcagtgtgcgtgtgatccacgcctaaatagcacagccttgctgtgcgtggtagaagttgggttagtgttgacatgctgttgactcaccctcccgaggatggaagctctggcctgggtcaagttgtggtcactgcagttaacagtttgttgatctcagggagtattccacagttgctgatgtaattgacaatgattggagccagctcttccccagattcaaatggaccaattagaggacttgttggttctgtttatcaactatgtaagtgagtactgtgaagttggcattgtttttagtctgtatttgggtaagatgaaactctgttctcagacagtaatatctttcaaaagtacaatgttacttattgtgaccaaagtagggatgaagtttgcaaattatttggtgtaatgatttaatttggccatccatgcagtgcagttctctaccagtgtgattgttctctttgtaaaatactcttactttgccagaaaattgtttgtttgtttgtttgtttgtttgtttgtttgtttgttttgagacggagtctcgctctgttgccaggctggagtgcagtggcccgatattggctcactgcatccttcaagcaattctcctccctcagcctcctgagtagctgggactacaggtgtgtgccaccacgtccagctaatttctgtatttttaatagagacgaggtttcatcatgttggccaggatggtcttgatctcttgacctcgtgatctgcctgcctcggcctcctaaagtgctgggatacaggcgtgagccactgagccctgttgaaaattcttattaataagatgtttctcatagaatgtttcaaaaaattgtgactggtttcaaaatcagatgatttgcaagaattagccatagtataaacacatagttctcaaaccgttttctgggagtgggcccagagatctatttaacaaaaccttgagtagagtctggtgcaagttaaaattggagaaccactaatgtaaccttaccttatctgtggaccacattttgagctttggaagaaataaccctttctatccttcacaaggtaacagatgatttttttgcacaattatttgataatgagcttatatttgagattaaggtatgcacacgataatgtacattctcactctaggtctggggaccttgattctttgactcttctgtccttttctctccagttacttggttttgtgcattaacaaacttttcaatttacttatttttttttacttatttacttatttctcatcccttacgtaatgttgcatcattgttttttgtagcctctgcagttcaagatactaatcacccctttctaccacattaaaatacagactctacctaaaatcatgtatgggagtaacttgatatatacgaaagtgtaaccgtgtcacaattccccgccccaccccgccagtctacataaaactgcaaacactttattgcttaccaagaaagtagacaataatatcgaagaaagccctccttttcctcttctttgaccaacaagggagcagttcctgacaaatgtcagtttgctttttgagttccttaggtttctgtgttgtgtttgcaatggataaatattgagtaacaggtactgactgtattgtatacattgaaaactatccaccaacagaatatttgcaggaggattttgttttgttttgttttgttttgttttgttttgttttctgagacaggctatctctctgtcacccaggatggagtgccatggagtcatcatggcttactgtagccttaacctccttgtctcaagcgatcctcccgcctcagcctcctaagtagctaggactacaggagaggaacaccatgcctggctaatttttttttttttttttgtagagacagagtttcgctgtgttggccaggctagtgttgaactcctgggctcaagaaatctcccaaagtgctgggattataggcatcagccactgtgcctggcttgagaatgacattctataagtagtttcagtcccttagtttaatcccatattttgatcctataacatgtacaatatttgtgtatagtatatgatctgccaactctctaagaagattttaaaacttattatgttaaatttcagacatatacatcatccagcttcaaaaattgaccacattttgctgttcttgtttcagcacctccccctgccccattttcttttctgaagcattttaaaataattctcaggtatcatatcattttacttctgttcataggtttctgaaaggatttgatgcagaatgttattattaaaccagtatacagagagaaaggccactggatattagtacatgttttggtttcagacggtccttttaagagtatattaaatcacataaggattttctgagtacccattagaaccacaaaaaatacctatgatacccttcttactgcagtagaagatgagtttcctagggtagccctttgttgatggaacaaacatgtattttgtttcatcaggaaaatcattggaacagccatgactcagatccactaaatgaaggaacaaaaataggacctgcctcacctcctgatttttttttaaatctctaggatgagtaaccagaatatttttatgttgtgctaagtaggtttgtttgtttgttttttactctgacttatattatttgaattgtagaaatatattgtttttacttttttctttaaaattctatctggagtttctaaatgagagattgtagctcctaaaacctttcttagttttggtgtcttgctttctgttcttagcgtctgtggtcatttctaactcccagtgaggaaagagctctctggtcttgtttctttgttaaatgaaggagcaaacctccgtctcgttgatccactcccaacccacttgttttgtaacaatgaaagttatctcatacttaaaagacaacttgaaattataacacacctgtaacaaagtaaagggtatgggtttttacttaggtttaaaaaaagggcagtaacccttttcataaaaaagcaaaatttagatgggatagaacccccgtttatagaaaagattttaaaatctcatttgctctcattgaaaccttaaccttctctcaaatactggcgcacctctgaggaacttcaaatacggtttgaaaactaatggtttaaggagggccaggcgcagtggctcatgcctgtaaccccagcactttgggaggccgaggtgggcggatcacttgatgttagcctgggcaacatggccaaatgctgtctctactgaaaataggaaaaattagctgggtgtggtggcgcatgcctgtagtcccagctactcaggaggcggaggtggaggcgggaggatctcttgaacccaggaggcataggtgcagtgagcagagatggatctcttgaacccaggaggcataggtgcagtgagcagagatcgcgccactgcactccagcctgggtgacattgagactgtctcaaaaaggaagacgaatggtctaaggaaactagtttgtggtttctcagcggagaatgacattctagtttctacagatctggcaacagaagacaggcacataaactggcctgctttggagtcagggccaagacttaaatccagatttaaaaccagctttttttttttcttcttctaaaacaaccaacctgtgttttaggtccagtgtctgccttgtaagttgctcaaagctcagatacaaggaagtaatcagcacacatttttgtgataacattcctgaaaagaaaaagatgaggtggactaaggtaaatacactgctccttaaaaatccatatttttagattatttataaatcaaatgggcatggttaccaaagatgaattctagaggtgtaaaactccagtcttatacctcaaatttcagttttccttagggagcaaaacacttccatgatcttactgaggacctaaaaaagcctgtacatattttaaaaatagcactccctagataaagcctgatggatccagggtacagtagaatcatgaaattgcctgtttctttttaaaagatgtatatgattgctcggtggctgtatattgtccatcgtgtgcgtgcctgtgtggtatgttggttctttcagagaggcagtggcgtgcagagtgagaggatcacagatgtgtatgtgacaaaactatttcttttctttcttttcttttctttctttctttctttctttctttctttcttttctttcttttcttttcttttcttttcttttttcttttttgagacagagtctcactctgttgcccaggctggagtgcaatggtgtgatcttggcttactgcaacctctgcctcctgggttcaagcgattctcctgcctcagcctcctgagtagctggattacaggtgtgcaccacgatgcctggctaatttttgtatttttagtagaggcagggtttcactgtgttgttcaggctggtctcgaacttctgacctcgtgatccgcctgcctcggccacccagcgtgctgggattacaggtgtgagccaccgtgcctggctgacaaaactatttctaaaacacaagtccagatattcctaccaagggctctctggggcttcgttttgatttatatgcaaaacactcctaatgtggtgacattggggagataaagatctgggatgatgagagagaaaggcaggtaggacacatgcccttccagtaactttccagctagggcttgcatttaacctctgatggaggcctcaccatccaggcagatgtacttgcttaggaatgagtttgagataataaggctaaatgtgctgccttctgtatataatttgcatttgtcctaatgtacgactaaggaaatgaaaaatcaaagtttgagtgactaaaataaaagaggtctgtggagtaattggattgaatttgcaccaagtcaaggagaaaacttctgtattttgtatgttttgtcatggttctatgattacttgttagaaagtgatataaaattcaataacttagtttgatatgaacttggctatctttaagttatagaagtcgtgcatataatgtggctgttttcaacccccataccctttctgagtggttggagatgtcttgaatttcgaagtgagaaggtctggtgctgttacatagataatcatgttagccagctttaccttctgataagctctcaatttaagaaagtacttctaatcctggctttatctttggcttgctatcttattatgcacagagcataattgtaagaagggaataatatctcttgctgtctattcactaagaatagtgtgaggacagggctcttaaaaacatgaagagatgggcactattgtatagatatagagatttgatgaaatgttaaaatgttggatgattttaaatgacaagtggagtggtgagaagtttatttttaaccttatgtggataccttggatatttagaaacatcgaagttttaaggaagaacaaatatcttgactccaagaaaatggtcatgtgatactgtggcatctatttggtcttcctgatgtatatgtttcctgacatttagctcctaaaatccttggaatctccagtgctaagaaggtcttatatgctaatgagatgactggtggctgggtaacctaccatgtgattagagggttaggactttcagtcaccctccccaacctccaggagctgaagtttgagttgataaactaatgatcaatgatacctacataatgaagctttcttaacaaccctgaaggaccgcgttctgggaacttccagatagctgaacacatggaggttcctggagggttggatgtcaggaaagggcatggaatctcgttttctcttcagccgcacctcaccccgtgcatctcttccatctggctgttcatctgtgtgtcctttgtaatatcctttaaaataaatgggtgaatgtaagcaagtatttctcttagttctctgaaggtgctccagcaatgaatcaaaacgaagtaaggggtctggggaatggtagccagttggtcagaagcacaggctacaacctggggcttgtgattgacatctgaagttgggggagttttgtggtactgagccctcagcctgtgggatgtgtaatctccaagtacagtgtcagaatccagttgaattagaggacactcagctggcatccattattggcatgcagtattccttgtcatgagcctgggcaacatagggagacctcatctctacaaatatagctgggagtggtggtgtgcacctgtggttccagctactcaggaggctgagtgggaagatcgcttgagtccaggaggcaaacattgcttctcctccaaatgctgtactttaacatgtttggaaactcctgcaaaggaatttcaacataagcgaagtcaatgggttataaaggactgaatgccattttgtaaatgtcagaaatcaaagtcacaaccaagttaagttctagattagggccaggaagagaaatgtattatctggtcaaccatatcaaatctgtattttggtggaagagcattttcttatattggttctgattggtttgatacggacagggaactgttttctttattccagttatttgttttgttttgtttctgagacagagtctcgctctgtcgcccaggctggagtgcagtggtgcgatctcggctcactgcaacctctgcccctcaggttcaagcgattctcctgcctcagcctcccgagtagctgggattacaagcgtgctgtagtttttgtatttttagtagagatgaggtttcaccatcttggccaggctggtcttcaactcctgacctcatgatcccacccgcctcggcctcccaaagtgctgggattacaggcatgagccaccgcgcccggcctattctagttgttaatcagttaacatagccaaaagatatagaataagattgtagactgaatccatagtctaatgatttgtcttcctagtaattgtgaataattcagacattcaaaattagtctggcatcatacaaacattagactagtcctaaaatgaggatattggcaagtgtgttaataaaaattgcatatgcagtattaataggttccttacgtaggctgccgattactcaggaactgtcagatgttttgttttgttttgtctttgagagatggggcagggttttactctgctggagtgcagtggcacaatcttggctgactgcagccttgacctgctgggctcaagcgatcctccctccacagcctcctaagtagctgggactacaggcatgcaccaccatgcccagctaatttttgtatctttttttagagacggggttttgccatgttgcccaggctggtctccaactcctgagctcagggatctacccacccatgcctccctaagtgctgtgattacaggcatgagccactgtgcccagcccccagatttttaatcttctctttgacattgagtttcagaaatgaagtataaatggtgaatttttagtgtagaatatgatgcactaggaagatcacttacccgtttattcactttcttagaccatgtcaacccgattctgaatttagggttctgttgtgatggtgttctttagaagtgattttaacactcaaaatactatagtctgtaacataatttactgattttttaatttttgcaaactaagttgaagtaatcaagtatttatgagttctttgggtgagaccatctgtcaaagaattctgggcttaatggagatacatatatgttgtgaatactaaacagatatccaagtaataaagcagaaatcatatgctgtgtaacagaaatgtaaagttctgaattagttcacgagtaggagagaaacttttttttaaaggtagaggagaactaaaagtaatttcttaaaagagtgcctattttacatcttgaatattaaaagtctaattcagtgccttgggatcttgttctttttgtagattttgatttgaatgaacttcagtttgctgaaatgtctaatgggtgcaaagtacagatttaattataaggttgagctaaaatcagaatttaagcatatggcatatataataccaatttaatctttcccccttaaatttagttatttttagtgagtcccaaacaccatatttgagacatcacttttttcttttttaaagagatagggtctccctatgtgaggctggagtgcagtagctattcacaggctcgatcatagcaaactacagccttgaactcctggccccagtgagtgtaatgtctcaccatgccaaagtacttttatcttaaattgcttatttttttgtttatttttttaactgactctgtttacaaaattaaccttttatctagtgacagctagattgtatcacatttgtcatctatggacaactgatttttagttgtttaatatggtaagtttattattgtttttccttatttaagaaaacaggatctgagtgaaaaaaaaaaaaatcttaattcaactatcacgattccagtaggaagtagacagacattcatctgtatacattaggtgtcaaagtagagttttgtggtttatcattctgaagatttgagattcaagacatgactatctttcagtcatattgtgcaatagataacatataatgtttctcactgatgagaacagttggttagatctctcagatgacttgaattaggtattagttcaagtcagttgtcagtaagtttggctttatcgttcagaggagcttcttatgactggacatttctcaagtattgccgtattggtcatttggctatcaatgcttaaattatactcagtatagtataaattttcttatttcccttatttaagcatgcctccattacactgttgttgtctctaataagagtttaataatctttgttttggcttagtaaaaagagccaacaaatatatgagtgactgactgagtgtattgctctatgcgcaattgtcttaaaggaaaaacgtttatagaatcactgtgaacaataaaatggttgcatttcgctggaaaacctcggtgctcctttggtaaataatgaagtgttttgttttacgggccttttcactacttcattgacaacagacctttttttttaaattaattaattaatttatttatttatttatttattttttgaggtggcgtttcgctcttgttacctgggccggagtgcagtggtgcgatcttggctcaccgcaacctccgcctcctgggttcaagcgattctcctgcctcagcctcctgagtagctgggattacgggtgagtgccaccacgcccagctaattttatatttttagtagagaaggggtttctccatgttggtcaggctggtctcgaactcccgacctcacgtgatccacctgcctcggcctcccaaagtgctgggattacaggcgggagccactgcatctgaccaacaacatatatttatattacccagtaataggcatagtctaaggaagataatagaatttattcttagtagtgaactctttggcttttgaagcagaatttttttttctttgttcttttctgtgatagtaaggaaggaaggaagggaaggctactactaaaaatataaattgctaaatagaagtcaagtctctgggtgttgaagctcacatattggtgctgtccagacctgacgcatctagaaacaggaatttgcccttagcgtaagcttagccaaatggttgagtcatttctaagtattttaacattatagaatgccttaggaaatgtcatgaatatctaaaacaggtcttcttgaggattttattagtttcttaaaacatggaaaggaacttgattctcagtgctggtacctaaaattcaaagacattagttgtgagttgctgtgctcctcagctctaagccacagttgtcatggccaagcctgtctccttatggagagtggccttgctgtttcctgcagagcttctcttgtgcctggcttgtgcctggaagtcagcgtgtcaccacttcagagagacactatagaagcttggtgatcttcaaacaagaacttaaaacaaagaagttttctttcacagatatcttaaaacttgtagctaaataaaacgtgaataactgtgagagcctcattacagcaatttttaaaaaagcagtacatgttttgttgtatcttaaacatcacagaatggtattgtgtgtccagttttgtttgtaaaatgtaaccttcgtgtgaatgaccatctattcctttctttttggaaggttagtttgtcagctgttgtgtgatgctcaacattttatgtaatgacatttagcacaacgtttcaatataacatctcaggaaaacatttaagaaatagtgaagttctctgggtattacattaatcatattaattacctgttgcttttaatttatcaccgtatcaccctaatatcacaaggcatgtgtagtactattttgtaaagattttctaaagaccttccctctataggaaggaaaatttaattcagaaattgggctgaactctctttcacttgtgtgaaaatgggaaaattagaagtaatttgtattttttattgtgaaatcagtgtaggaacctgtgctcgtatcatggaaacaacagcactaatgtttttctcccctcgggtgtgggctttgctgcagatatccatgtcttctactttttctgttcttagttcttattcacttattgtctatacttcgtgtcactttattgaatttcacaaatgcaatttaggaatccagggatgtgataaaatttgtgcatctgcttgtcattagccatctcacgtttatatcgctaagtgaaaatttaacttagtttggaacaaaccaccatgatttagttcacctgtatagtttaaaagacctaagacctgaaatttttttttttttttgaaacggagtctcactctgtcacccaggctggaatacatggtgtgatctcagctcactgcaacctctgcctcccgggttcaagcaattctctgcttcagcctcctgagtagctgggattacaggcagctgccaccacgcatggctaatttttgtatttttagtagagacggggtttcaccatcttggccaggctggtcttgaactcctaacctcatgatccacctgcctcggcttcccaaagtgctgggattacaggcgtgagccatggtgcctgtccaagacctggaattttacactgcattgggaccttataaaattcttgacttgtacccttttggcattttctgaatgctcatgatttgcttctgaaatattttaggcctttggaaacactccttcattctaatcctctcttttcttgctctcaattcttcatgtcatgtaattattttgcctagagccaaatctgatgtgttattataatcatcatttctgcaggagcttggtaacactcctgcttttgttccctttaaggcttcttttggttttgtttattttgtttcactcagaatgatctggttaagttttgcttgatcatccatttcaaatctcttagtacatttttcaaattcagttccaagcatgttaaatgtgtcacaatggaagtggcccacggtcaaatacattttgggaaaccttggttttaaaaaagttaaactgacttcattattacggttttttttttcaaaagcctccagtatccatcttgaatgatccatttcccatatgtgttttatgacagaattctccccactcccaggtaataactgttgacattttctgaaaactgtttttgagaacactgaattagatatgaaatgaggcatttattcatacttcgaaacgaatgtcttaaacctcactgggccattttgagtatacattactagtgatatatttaataacttagtggtataagcatgcaataacaaatttcttacacaagagaagttctgtgtagaaacaaatttaatactgtggctaaagaaatgaaccaaaaaaatttaatatcttgaaatttgcttcttagctctgtttagaatcattgtgattcacggatagtaaattgtcagagtggacttcatgaaccttatatcagacattctgaaaagagctaaaattgccattaaactgcatgagttaaaatatcttagatagtttaaaaatactatgtagacttggtgagtcagatctgccacactgagcgtgtagctggggttgacgacacacgtgttgcagtgtcgttaccagtttgtctcttttagagacaacttggcaggcagacgtcttgcagataaacaaggaaagattgtctattttaaatggcataagacattctttaaaccagtgtgtcatatgtggttatatagtcagcattttctttagtgcaggaaatcctctctcagggttcctgaataaatagcaggtatctttgtagggatagctcgcaggagatttcaaatgctgtgtattcatcagttcaggctccccagatgtcttacgaacgtgctcattttagttttcttttcttttccctcttcctgctagatacaagttgagacaatatgattagctcttaaagtgcttactctccattttatgtatattactgcattttaatcctcataatatcctgtgaggtgggatgttactatgtccatttgagagataaaggaaatcaagaggtaaagttaactggctttctccaaacagctggtaattactaaatacagaattgacttttgccttttgattccaaagatcatattggtactttcatgtgtgggtcccttcagccagttcctacagtgaccctgacccagctgtaagtcccctgaggtctctagagatatagacagtgatggattagaccctgttcatagttgcagatacaagacatagagaggtttctagcaataatttttttagttatatattttcatagggcttttgatttatgtaacctattagtatatatttgttattccagtagagttaatacattattcaaagagattccagtttttaagccttttctccgtttgtctaagttgttcattatgaaatgattggctagaatttgaaagtctttacctacagagagattctgactggcttgcttggtcttggaaccctagttatgagtgcattgtcttgcttcctggtgaactttgcccagaaatagttaccacctcattttttttttttaaatgaaagctggataattaaccctcaagatttcttaattaaaagattactattataaattgacccacagggagttaatacaataaaattatttttgatcattttatatgaaataattatggggcaatcttctgtaatcttgagttgaaggggttatcttgcttaatgttaataacttttgatacaccaactaccttttaaaaattaacgttttttttttttgcttctgtggaagggaggctgtattttgtaggatttacagtttacatagttattgttttatatgatgtcagttggattaattatgttttgagtggaaactctgtttggttcaaccaatatttgaatgctaattttgttctgtgaacaaatagaaatacagagaacagtaagacatgactctttccccctaagtaaaggcttaggttggagttttcaacctgggaattactgacattttgagccaaataattgtttatgttgggtgggggagggcctacagcggaggctgcctgtacattgtaggatgtttagtaacatccctagcttctacctactagatagatgccagtagcaccacccaagtcgtgacaatcatctttgccaagaactttgaacctctacctagaaacagttcatagggctcaaaaagcaaagtggcctaggacccatgtagttaacaagcttaccctgttggagaaccactgcatagctgaacaacatgggtgagactagtgtcagggtaaaggagctcttgactggagattggccgtacacagaaaacaaagtgagtgttatggatatttggggatttaccttcattagggcacagttggttagcgttaggtgtacaccaacattattccctctttagaaacagccatgcacgtaacattttagcacatctgaagaggcacttctattctaattacctaaaattcttattatctagaattacatgctatgaacaacagcagtaaagtcagaagccagaatctatgtgatgttatctgttttgcgatcacagttgtgttcttctcttagtttatttgaacaagtttgtgaaaaaatttttgtgcttatgtaaatactctttgcttagattttttggtagaatgtaaatctttcccacacagtgcaatacccctcctgcccaagggcgagatatagattgtacagtttgttatttctgtgttttagggcttattcctctgtagacatgtcaaaaagacatccgtcgggggtaaggaatgcattagcaattcaagctgataatctgcatggtgagagtccagataattttttccccaggtcacataggcagctctgcacaagtctgttaaacatatgctagttttgaaaattaaaataagttcccatcactcaaggcaatgaaacgtagatgaattgctctgccagattgactcttagaactcctgatgtgatgtggggctagacagaatgggatgtttgctaataaatcagggaggtagtgattgttttccttctttttctcccccacccccgtcaggacaaactcacattctgtagcctggtgcactctaataatgcctgttgaccttggccatgaaagcactctagactcaccccctaaacaccgcaccgaatgtgctcatccttgaaatttacaagccttagaatcttccctacctccactcctgtttactgcctcctgttactcctggtgcttccagtcagaccgtagtcttggctgtgcagtacctttaggagccctcaaaaatgtttaatttcttttaaaatcagaaggaaaaataaagaacaagataataatcatgaatatacaataatgaatccagcctgacttagagttgtctttataccaatcaacagagccctaaaatatagcttttaatgtttttttaagagagaaagaggcccacgaaagttgtcctggggcccccgcatcctcctcatacactggtgggatgctgctcttgcttgctttggaatgtggcagcagctcccagtgacttcacacgtttattacaaattcaaggtcatttggacgctagccttgtgctacctttcatgcttcctgtccgacccatactcagcctgggcatgttttctgctctgatctttggtctgccttccttctccttctccaagtcaaaccagtcactctttcctgagagctcttcggtgtacccttgccagacctctgcattaacactccagcacctttggttagccaatttggccttatttgtgtctccaccattggattatctgtccatcaaggtcaggaatgttttcgggttaccccactgtccccaactttgaatatgttcactgcctggaaaatgtttatctgaatataaggcatcaagccagaacttgcccaaaacttaacctaggactcaaacagctttgaaatcttatctgtgtagagtgggaacggcatgtgtttgataaccatcagcatttgctgttttgcttagccatcaacaatccgtttctatctcttcctcatagtattttcagctgtatttttgtacagcagtcattcacgttaggtgttaggttacactgaaatctctgacaaccagttctgtgctactgaaggcttttagcagcaggattaaaaaaatagttgattgcacattcgaagtctcactgctcacactgtttatgtaattcttggagtccagttagatcatctgatttttaaaatgttgcctgaattacaaaggagttcaggaatgtgttatcaaagaattaggaaattaacattgaaatttattgagcaacatagctaataggttgtcttgctttttaagccttcttgttttctaggaggagcctgaagtccgtggacaagttgaactgtagctggtatttaggaattggtaaagacagaggtgtggatgctatgttttcttttctctgttaggaaattactctcctggtgccacaataaaaaatttcacaggtatctaaagtggaatttattttgtattgttccacacctttgtcaataattacattttctaccttctagtttattactgttattatttttcatgccaggtgtttcttaattgttggcataagtatttattgaatgcttatatgtgggagtgagagagtcaggccagtgctaaagagtagggaataacccctagacagtgaagtaacttttgtcttgtttgcacattaaaaaaaaaaaaagattaggaatccttgctctatatactagaaatgtttgatgttctcttttcttctcttcaaacagagaaaacttagatgaatacttataggctctactgtcaactaactgcaccctcctaatattggcgtctgcatatttttaccattgtcaatatcagattgcctctgatgttgtgtcactgaaactgatagtaacattacatccaagagtaagactgcagtgtgatttttggctcttggtcttctgttctttcggcaacaattttttataaatatagtcaagaaaatagaaataagagtcttcactgctacctccccttcagaattattttctcctagtattgtggttcctgatagcctttattcctatagaaatggcaattcgaaaaattccttctgtgaatctgagggctctacaaagggagagcttctttgatagtgctttggtgtaagttatttaagaaggacaatctacccaggcttatcaagcaaataacctggaatttaaacctggagtattctttagtgttccaagtctgcaggaaaagaagtaatcttggcttaaactaaataagttaacagaatacaatttgaacaatgaacaagaatgctgtttgaaaattatcttgggtttttatgtcaagttaatattctcactgaatttctattatgtttgtaaagcagctttctcctagaccaaaaatcctagtaataaaaccacaacagtatgagagttataagcacacagtaaaggctgatgagtaaatgttatgacactttgaaaggaaataaaccagacgatataatgtaaatatcctttgtgcttatcaaaaataagtgacttcatgttctgttcctgcaatatttctgtaaatctgctaaaaatagaaaggtaaaggtctaagatcataaatctctgatgccctttccttaaaagtaaggaattcttgtcttggattcttatataatatacttatttataatctcacttgttctgattgcaggtggcctcttactatctttacatccatgtgaatgtgtgtgctttgatgtgtacatatgagagacaagaacaaaagtaaatgtcaaatatccgaattcctgtttcagtgagctttcacggagtaaattctttttgtctacttgcctgtgatctcttctaatatgacttgcgttaatgacctttaagaaatcttttaataaaataaaaaattttattaaaatcttttaataaaaaaattttattaaaatcttctaataaaaaattttattaaaatcttcttcatacgtgttacttgaatttactcatggcaaggaccagttagtaccattttatgaaatcacaagctcatgggcttgtgataaaacatataagtgctttaaatttggcattggtaacggcaggccgactcacttgaaaaatgctctgaactgctctgcctcatgctggtgggaagtcagatggaaatgactttctagagagtttagctggcctccaagcttagtgggtactcactctccttatcccccgatagctgctctgagattttaatgcacattgaagacaatatgataacttaacctggaaaattagcattttggtaagggtctttaacttcattagtattttcataccactttggtattagaaattgtaaagatattaaagggtatggacaatgtggaatgtatgtaccagactcagcagtgtatactgactccctcactatagcccagaactggaaatcccgctaactacctctccccatcctagcctgaattgccctctccacctatgttggttttacaatggcctgacgcctgaaagctggtagaaactgtataggaaaatagggttgggataaatttctgggctgacaaaggatagaggaatatgcttctttttccccttgtccaagtatatcagcaactctaagatgcagatttatcagtatggctctactgggcatgttctagttaaatggtagacccactacctcttctggaatcttgttttccattatattcccacctgcagcttttcaaagacttattctcttctctaatggtctcttggttcttttttttgcccatgctctacgttccgagtgggtcaacattgcagtgggtcaatgagaagaaatagaggggaaaaataaaagaaccagaaagaaacctgttaagtttgcacttacttgtgcattaagcatattagcgtaagccttaaactctagaaaactcactgtagtgctgtaaagtaccactgataaagtaaaagttcatttttatgctgtgtcgttatttagtgatgaatatgatattgcataaaagatgaggatctgtaaggccaggcgcggtggctcacgaggtcaggagttcgagatcagcctgaccaacatgatgaaaccccatctctactaaaaatacaaaaattagccgggtgtggtgacgcgcgcctgtaatcccagctactcaggaggctgaggcaggagaatcgcttgaaccagggaagtggaggttgcagtgagctgagatcacgctactgcactccagcctgggcgacagagtgagactccgtctccaaaaaaaaaagatgaggatctgtgtataactgccaggtgttgtgtgaggtaccatgaataacctggcaatatcctaactgtgcaggtatgaggagtgacccccaggaatataattgcaattaaacttgcaaattatgtggggatactctatttcagggcaataaaataaattatgtctagagctcataactcttacacatatttggctaggtctatgcagcaaaacccaggtgataactgaggctttaactttgggatttgtttggtgctgactctgccacatggtgaaatttggtaggatctcagtgcgagtgtcacatgatcagtctgcttgacccaacatgccagaattccatttctcagcccactctcttctctgcatacatacctacctcccggagagggctgggcgggagcctacgtgtggcaagagccctcactgcttttgttacacagatttcaacacatatggcttgatggagtgtgattgcagtagcatgaatgtttggtgatgaaatttgcatgtcctttgctgggagaagtataattataagatttttgtattcacatagccacatgtgaggtatgagcaggaacggggtctatttaatagcattagattgctttcagatttgaaatatttccttttagaaatatattgtgtaaacaaaatatgtttaattttttttaaaaactatgcctttgtacaaattgtttatcatttgcagaggtctaaaaaatgtaggagaaaagaagctcacaaaatcaatcagatctaaagattgcaaagattgattaccatctccttaaaagcttcagtacatgtgtttacagtatcattctatttgcctctgctcagattctttccaattctaggacaacccaaagtgtatagatcataagccataactgatcctaccttacataatacattaaatataaaatatttatggccaggcatggtgaccagttctgtaatcccagcactttaggagaccaaggcaggaggaacacttgaggccaggaagttgagaccagcctcggcaacatactgagaccttgtctctacagaaaaattagccaggtatggtggtatgggcctgtactcccagctgcctaaaaaaaggcaacttgagaaagtttctaccttctgaaacaatctatgccttgattctatcacttagtattttagttattcctatcaaatacatgactgtgttaatttcttttgccacaaaaatgctgcaaagccacaaactcactccaaaatttagtggcttagaacaataaccatttattatagcccacaagctcaagggtcagctgatcccggcttagcttggctacatttgatataaaacagtagaaatttagaaattgaatatatgtagaatatctcttgtaccaaaaatgaagaggaataatagattttgatttttctttgttgtattctgtgctgggtgctaatctgtcctagctgtcagaacaagtagaagccatactggaaaatcatttatttgttactatcaaatttatttcagtgaatgccattcaaaccactctctctgaggagcccagttaccaagtcctccaccttgttagcaacatggacttaaatgcactaattctagaatgagatcttagcaaagtaccagcatttgagatttgtgcaaattgagctcttaaactgtgtgtatatgtgtgtgtgtgtgtgtgtgttcattctagcactcccactacataccatacaagtagctgtatagcaggtatatatacatgtgtatatgtacataggtaggtatatgtcaactgttgaaaaactagaaaatacacattaaataaagtaagggttgataaacattagtagttggaacattgggagatttggacttctactttgcagattcagttggctgcattagatttaaggaaagaactaactttggagaaatttgtgtttgcatttcaggagagatttcttaaagaggaaactaccagaggttagtagatattaacatctagtgatttaaatttgagaaatgcaaattagacatttaagctgtgggtttgcttcccgttttacttgctctaaaagtaatttttttaaaagccagtaacaaagacatgcaaaatagtactgccatgggggaaaaattacttgaaaataatattcaagattgaagaattaaaaaagcttgacatctagtaccaggaatgccagctggcttgttctgtcaaaaagcaagcatgtgctttggaataacactcttgagtagactctaggcgggttttgagcccttctgattatctaaatagatgtggaagtgacttatcttggtttttctgagtcaaatgagataatgagcaaaggccttagtaggtctttgatttttgcctctaaccctttttctatctgcatgttcacaaggtcaaggctgatgagatatggcaatattgagagagtcagaataggataaagatctcaaatactatatatatatttttttttcatttttttttccctttggtgactgtatgagacatgtcagtaaaactttaaagacaggccaggcgttgtggctcatgcgtataatcccagcactttgggaggccgaggcgggcagatcacttgaggtcaggagtggcaacatggcaaaaacccgtctctactaaaaaatacaaaaattagccaggcgtagtggtgcacgcctgtagtcccagctactcaggaggttaaagcacaagaatcgcttgaacccaggaggcagaggttgcggtgagccgagatcaccccgctgcactccagcctgggcgactgagcaagactctgtctcagaaaacgaaacaaaacaaaagacacacagaaaaactgtaaagacagaatgaaagagatgaactttttacatctcgctcatttcatcacatactatatagtatgtgtatggtttcatatatgttagtgtgtgtgtatgtatatatatgaagttaaaagaaaacattcaccttttaagactaaatggacattgactagattgtaaactgtttttgaggctaagagtttgtttgccatgcataaggctctattttttgtaattccacttttatattcatttatatcagtcctagcagtagatgccactcttactgggtcctgcctaaatgcatgcttcaaatgttggttattaatttcacgagtagtgaataacaaagactcctattgagggacctcttgatttcctactgggcaccagcagcaagcatgacttactggccttcttatgagtgggtaggagttttgggtcaacttgagaacatctatcctttgagtagtaaaaaagcttggtattaggttggcacaaaagtaattgcgatttttgcaccaatctaatatcaacagaggccgtgaaaaacatcaagggaggatagcttgtaattagaagccagatcaacagtgacccaaaaagaatttcaggtttccaggagtgaaatatgtagattactcctctgaaaggaattgtttttctcctattcgctttcatggcaaatcattttttaagccgaaactcaagctctgaaataattgtgtagcaaatagtggctgtgaatagatgtggcaactctccacaagggtaaatagaaaccacttgcagtttcagtcatcacattttatttttcttttttaatagcttctctatttttgctcaccacaaatacatgcacacacacacacaggggcaaagccttggaaaattgcaattttccattttaatttgagagacagcccggtcacattaacagaacccttgacggaataggttgaattcccttctctgtccctataaccccatggccttggacatatccttacctggtgccctttcctccctcttatggtccacttttgtgattctgattttaatttcagttctctgttagtgatgaaatgagcaactgcagatgttccgcttacactggaaatacttttttggcatttaaaagaaaaccctacagatgaattattcccctgaaaggggttcactcagattttctagattatgattctagaaaatagttctttacatttgacaatggagaatttaaatgttttaatatgaaaatgtaaagcactcttgtggggtatagttgaattatgcccaggttaagggaatccagtatttatgtcaggaaaccatggatgtgatagaaatagtatcgctacaaagctgggcacagtggctcatgcctgtaatcccaacattttgggaggccgaggcaggaggatcacttgaggccaggagttcgagaccagcctggccaacatggtgaaaccctgtctctactaaaaatacaaaaattatctgggcgtggtggcacaggcctgtagtcccagctacttgggaggctgaggcaggagaatagcttgaacctaggaggcggagaggttgcagtgagccgagatcatgccactgcactctagtctgggtggtggagtgtgacagtgtatccaaaaaaaaatactgagattatgcaagaatctgactcgaagaagtttgaactgattaaaaagtaccaaatacttcattatatgaggccagctatttagactagtcagcgggtggttcaaatgcagaaaacagatggctttcattagccagaaaccttaaaattacataaatccacggatgcaactaagctatggatctgtgccctctccttgccaaacaggacctctcagctagcaaaacagagagctccttgttcacttttccctcctagttgagaccctgttggggaggaatgctgccaagcctgctctataaggaattttgatctcctagatgataacagagagaaactttttggagaaagggaacaccctgtttgaaaggacaacaagagaacttgttcaagaaggtggctttgcatttaattgaaaattgtagcaactgtaggcgtagggtttccagattcacatctgcagactggtccagattaggtatatatgtttatattcgtttatgttatccccttaagcctcttttaaagccatttctaaaaattgctttggaaagtccatttcacttcagtattctttatattgtggctcaaaaatattttttttctggtaacaaaaatattttctttctgtttttaagacttgtagcatttttaagtttgatatgtacgtctctgtagttcagagcacttggtaaacagcctcttgcttttgaggcaatttatgaatgcttcattgtttttagctggttattttgttcattgtcaggaacactgttttcccatgggaaagcatctccagttttatgatgtcagtggcaagtcattcagtttacaagaattaccttcatattcagtcttagaaaagcatagaccacaaacggccagttatatcacagttctcatcttttaaatgttgtcttagatttttgcaaagtaatcttaactcaccttagaatagtgttaagacataaatagaactaaaatgtagtagttaagtggttatatttcccatctactaaggtatttatatttcttttcttttagaaaataaaaatgtttaaaaaattaggaataattatctttaggatgactttgtaagactgtgcttttttactggcagcaaatacctgccagatttcaggtatttggcaggtaaattgaatcttaaaagatttcaattttaagagtgtccatattaacagatcctgaataggaccctgtgtatcatttattaagtcatttcttggaggcttcactcaggaaaagggagttaacccttggatggcaatgtttaatgtggccacatttccttctggctgaatgccagggagtggctgcgcttagcaaccaggctttgtttcataaatgggttatttgatgcaggtgaggatgccgtgagttgtttgtcttgttttaattcagggagacaggcatatgtagtgaaagcatggaattgtttgcagatgggcttcagtaagaataggaaggtttctggttcaatttgtatctccaagctaattgctctgatttccatatacacatctggtgttggttcggggggaaaaaattttacttgagaaacatggcttttgtgagttgatatttatttgtgaagggcctcttgtaatgtcaaatgtaagaagatctatacacacaaccaattttacaatttctaattcaacagcttaccctattattgaggattcgcagtttaaattattaaatgatctccacttgaagaaaatagagcatgttaatcatcacgattctccaaacatttatttttaaagttaatattaaatctcatctggtggaaaacctgacaggaactgaagcatatattttctagtctaaactctcattgttaaaatgaagacaacatgagacagttatagcgccgtaatcaagttatttgaaaaaaatgttttaaaaattaccactttttggtagtcaacatacacacatatgccaacagatggcattaaaaaatggcaagaacatgagacaattatagggtcataataaatttatttgaaaaaaatgtttaaaaaattaccactttttgatagtcagcatacacacatatgccaacagatgacattaaaatagctgtaaagtcaagaagcagggaggatgacaaagtgaaaaatagaagaaatcaaaggaagttaagtcaaaagaggaaaaaaaaatgaagcatttacttggtttgtcaggtagggtgatccagtgtattttgccaaaaactttcctggttttagcaccaaatgtctcagaacatggcagctgatgacctccctcacagtgagtgatcccagagagcaatgaagaattgtgatgcccttcatgaccttgttttggatgttacacatcatcatgcccttcagtgacctttctggtagcaaagggtttgtttttaaaagagttgcagcatctttaagtctaatatatacatgctcggaagttacaccatcatcacttctgctgtactccatttgttgcacagacagaccctgatacattgtggagtttcccagggtccatgaatagcaggaggcagggactattgggggccttcttggaggctggctaccctggggagagaaattgtcaatttcctctccttgcggggaggaaatggaatcaagtgcatttgtattgacaagaaggtagaacgctttccttagacattgtaatgaacagattgtggataaacaaaagtacagagagagtttgaggcagaggaggagactgtttcaacagaatatttaccagctatggtaaaggctcattagtgtctccgtacagttaacaacatgctgccaagactggaaatctttgggacaggaatgaattcggaaggtgaacagaataaagtactgtgggaacaatggcgattccattagtggattgtacattccttacgggcagggccctccatagcatctgatgtagggccttatccacaggtatctgattattatttgactttctttaatgtttttgcagtgttattatctatactacttatttcagtaagattgacaacatttgcatttcgatttctaagatcaagacaatgaatttcctcttaatccctcaggaaagctgtgaaatttaaatttatagagcattctacttagcctgctgctttgcatctgtcagagaatgagaccccccagtttcatggaagtcacaggaagtggcaaggggctcagatggagttgaggggttctagctatttctgcagatgatctggatattttggcatcggctgctttgacttaaccatctggcaatgtaaaggcagaatttcgttaaatattggaaaagttacttgaaaacatggctctagagattttgccagcagcttttgcactcatgacttggttcaatctaagacctgttttgtttttttgttgtaaggacctaagtcctctgttgggttttgacgaagtatgtgtaaaaatgactaaaatggccagaggtatcttattttacatttatgtgggaagaaatgtttggaaactgtttcatttctttaactgaaaatttctcagtgcaattttagttggtgtttttcctcctgtggacagtttttaggaatgatacaagttatcgtggaatcacccagttcttgagtgtgtgaacgaatggcttctgctggaagttaattcttcttggcatgggtgtctcacatttccccagcagctggatttgacaagggagggcctatcatgattaatatgccttctaattgattggtttaataacacctttactcctgtggatatatttttcatttcttgctgaatttttttttctttttgagataccagaacctgttaagtgacacggtatagatatttcaggacttccattttctcttttaaaaatatttttgtaaaggtaatgcctgtacacagaagagtttgaaaatacagaaggcaccctttttcatgaagttattttgtgaagtggtctattgcctgcaatggtaatagctaggaccccttacttactacccagcaggcactatgtagagctccaaatgagaaaatgttggctccttgcagatggttgggagaggagacaccagcactcttaacagacttgttaagagttgagactgataaccagagaatattctgggggaaaccaggagggatcgccaacatactcagttatatttgtggatggtgaattctacagtgaatttttctgttcaaaatcataatacagtcacttgctaactaccaacgccatacttgctctcagtgctgagaggtggcacaaatattattttcagtcttggtcatcaggcagggcctggcaggcatcatgctctgtgtgagtcagtggagtttattataagaatgcggtagcctccacagtgattatatttattataggaaaacgtgtaattttgttgtcagaacctttcagcaggtaccacaaaatctcatatgggaaaacgtgtaaatttttcatgaataaattcctttcggtattggtaatttccttctctgttttagtataaaagaaagcattgccttataggtggctaagaacatctgtagcatacataacacttaatctaaaggagtgttgaagaccgggctgattcctaattgagaatgagcaagaatagaactctttttgatagttatccctgttcttcctccaagcctctgccttggagctatggatactataactaactgaagcttcttctttcaggtacccactgatggtaatgctggcctgctggctgaaccccagattgccatgttctgtggcagactgaacatgcacatgaatgtccagaatgggaagtgggattcagatccatcagggaccaaaacctgcattgataccaaggaaggcatcctgcagtattgccaagaagtaagtcctgtccggtggctagcaattcacgttggatcacatgcatttgttttcaaaaaatttaacttcttgtattttgcatcagtattttaaccctacagtaaaaatcttggttcctaatgattcaccataccattaatatatttatttgcattaccctatgatatacatataaatgtttttaaaattatgatgtcgtattatgaccatcactaaacagtagtttaagatgtcacagcacttttttttttcctcactctgtcacccaggttggagtgcagtggcaagattatggcttactgtagccttgacctactgggctcaagcaatcctcccacctcagcctcccaagtagctggactataggcacatgccaccaggcctgactgattttttttaatttttagtagagatggggtctccttgtgttggccaggctgtctgaaactcctgggctcaagcgatcctctggctggacctcccaaagtgctgagattacgggtatgagccaccatgctcagccctccacactcctttcatcttcagtatatatctcaccacggctctacagtcaaggtcttttggttaaaagtgctagcattaatttttttctgttaccagcttgatacatattttagttcatttgtatctgtttgtattctattatagtttggttttttcctcccttattaattttactttttgactatcatgttagttctatgaaatatactcagaaagctcacttttcactcattctctattgataaacattttcattgttcctgatttatttttttggcaaaagaaaatacatatttttccttcttgtacaaaaaaagtacaaagttcactgttctgcactttgcttttttttttttttttttttttaacttaactttgtatcctggaaatcatcctttgtcatttcgtggagatcttcatttttgtttaattctttgtagtctttttgctgttactatacagggtgctcctttcttattcaatttaaaatagctggagttccaggcattttatctcacacttcttagatagttatctctgcatgtgactgcatcttaagaacattagaagtaattagtcttatgcttgttggcaaagcagaattctcgacactcattataaacagcagatagcctggcaacattttcttttgttgtaatcctttttgtactagaaatttttctttagcctacttggataatgaatgtttgttgtttaattaatattactattctattgagatccttttattttaaattgtaaatactaaaattattattattaaaaggtttaatttgttttgatagcgctctgtttaagaaaggacaagctctaattactaattggtgttttgagaagcaaaaagcatctacattatcacaatatattacatattaagtaatttttatcttgaaaggagtatgaaccatgatgtgaaatgatgaatagtggaaatcactaatacttaagttcattatatgtattttttgttttgttttgtttttttttgagatgacatcttgctctgtcgcccaggatggagtgcagtggtgcaatctcagcttactgcaacctccacctcccgggtataaatgattctcctgcctcagcctcctgagtagatgggactataggcacccgccaccacgcccagctaaatttttttgtatttttagtagagacagggtttcaccatattggccaggctggtcttgaactactgacattgtgatccacccatgtcagcctcccaaagtgctgggattatagccgtgagctaccacgtatggtccattatatgtatttttacaagaacattctgtgtgctgatttactaagtatggattgataataaatcagcttttgcctgggtgtgacttttataaagtgtcaatgttagaaataatatttacattctgctgaagagttcttgtagtacaattgtgtagataagttataaattttataaatcagaactctgtgcatacttatatgtttttgataccatttttttgatatatgcatacagactatgtattctgagtgtcaaataaactttttttaaaggctagaattaaaatttagtttatgacattgaccaaattgtccttttctggtgaatcgactattttgatacatgtgtcatagtttgcatctaagtttttcttcccttagtttcacgtatgaataaccagatgttttcacatttgtatggtggccataccaaaaattactcttcttgaccccaggaacacccctcttttcccgtttcacttagagatcctactaatgcctgggtagctttactttctgtcttagcctgttgtttgtcccagggtgtattagtctgttctcacattgctgtaataaactacctgagactgggtaatttataaagaaaagaggtttaagtggttcacggttccaaaggctgtatgggaagcatggctggggaggcctcaggaaacttagaatcatggcaggaggtgaaggggaagaagacacatgttcacatggccagagcaagaaagagaaagagtgtgaagggagaggtgctacacactttcaaacacccggatctcatgagaacactgtcacgggacagcactcgagggatggtgcttaaacattgaaaccacccccatgatccaatcccttcccaccagaccccacttccaacactgggaattacaattcgacatgagatttgggtagggacacagagccaaactgtatcaaagggttgagcacagagtggttcttcccagttctggactttaccagattgttggtggccaccatgagtggggagaattagccctttgctgtcaccttcctcttgcaattctggtattatctgtcctctgcctaccacccacccacggaagtcttgttggatgatacacaccagccagattcttcaacattaggcgccataagtaagaaagggccaaaacatcataccttgtgagccattttaatggatttgggctttattttgtagcaacaggaagtcactagactttattttttatctatttatttttttctttttttttcttttgtttttgagacagagtcttgctcttgtggcccaggctgcagtgcagtggcacaatctcagctcactgcaacctctgcctcctgggttcaaatgattctcctgcctcagcctcccgagtagctgggattataggcgcctgccaccacgccgggattttttttatttttagtagagacagggtttcaccatgttggccaggctggtctcgaactcctgaccttgcgatccaccctcttcggcctcccagagtgctgggattacaggcgtgagccacccgcacccggcctagactttattttttcagagaagaggagtgattgtagatttgcatttaaacaaatcaccttcttgctttatcactatgtcccctaccatatatcttcgttctcccagagactgccatgctgcagcctctagccgtgtgctgtccagtactgtagccactggccctatgtggttgtttggcacttgaaatgtggctagtggaaactgatgtgtgctataagtgtaagatagataccgtatctcaaagatataatgtgagaaaacctgtaaaatgatcacattcatttttatataggtttaacattgaaatagttatgttttgaatatgttgttaaatacatcataaatgttactgagttgtaactatgtgattaaaattgatttcacttgtttcttttgacgtttcacgtggcagtgaggaaattgaggttccataggcagttgcattctgtttccgtggaacagtgctgttctctgtgctatcccgagccaccagtgactctgagctgtaagggtcttagatcccatgatctggcaagtgggagagggaggtagaaatgagtccctccataccttcaaccagaacttcactgcatgttgcaagtcagggaacaaggcttgtttggggtccttttaaatacatctttcattaaatacatttggatgtaagatgattatatgcctttctagaaccctgtggtgctctcttcctcctcagacataatgtctttggatactaagggtgcattgatgaacagaacacagggcctgttcttcaaagggggagaaaagcttgtaaaatcataattttagcaatctaaaaactacatggtgacagtgacactaataccatcagcattgagcattcacaaagggtcacaaagggtcagctactatgctaagtacttgcactcattttacccactcagtgacacctgtggagaagaaccgaaggaaagcaccttggggaattgcagcattgaaggcaaacaaagagagacgattccccatgagggagatgagcagtggccagagagataggataggaagtaggaggcgttacatgctggaaggcaagccatgtaaatttctaaatgaggggaaagataagagtgcaagcatgatgcaaacggaaagcagttgaagtgtagtttttgacatggtaaaatcatgtctgtcatgcagactgaacacatgtcaaatattttattcaattcattaatgagatgaactgtaagatgtgaaaaatggttcattttgacttggagagatttaaaattccttccccagcacacttgagttgcatggctatgaacaggaatcatctggaattatctggaatatcgtcaaattatttccatggtacaggaacacttgcattgctatggggtgtctgcagtatccatctttacaaagctctaagggtgtggaatagcttgtaaggatgtaagtaataagggtgtaagaattttaagggtgtaagtcgtaaaatagcttatttagtagcaagtcaactggaggaacatgctgtagaatcagataatcctttccccgccaccctcagggtctgcaagacaacacctgcatttcaatgctaggacacccagcaatctcttttgctcatatcttgtttttggacatttgtatgtgtgtgtgacaaaacattgttaggatctggcaaatagaaggtcattgttgaccctgtggaatagcatggggagaagttacgttgtagtccattgcaggaaaaacaacgtgggtcaatggtgagtcagctgtggactcctggaggaaagacctagaggcaaaaagctttgaggtcattgaagacaaaaggaaaggctttgtgattttgatttttaaatggaaggaatttgggcctaaggaagcttaaactaaactgtgggaaggactgatacccatcctaagcactagttgcaggtatctcttaagaactaggttttggccgagctccgtggctcagacctgtagtcgcagcgctttgagtgagaggatcgcttgggcccaagagtacaaggttacagtaagctatgactatggtattcagttctgtaagaactaggcagaaaggagatccagtggatatgtgattgcctgggtcttggaaaggggagggaacatctccttttctgaggaagaatggggagatagggtgggttaattaggcagtttcttttgccaggtgataaaaaccccctaaacaatttgtattttatatatggagaatattttctcccactgatgggaaggatcgtagtgtgggggatgcttacccaatttcttaaaaatgtacacagaaatgagatccctaggtgctggaaccgagggtcagtactgcctagaatttccccattagggtctcttttgtttctgcttaccttcctgctgtgtgtttactccttttctcctgctaagatgggtgtcctcaaggagaccagggatgttggtagccacgacctctggtagtgttagtcctggtttggcatcccaactttgttctgcccatgggcattatcagggagtgcttctggttggcactgctttgagttacacgtctgcccttggagccaccaccgtatctgcagggactcagtatcaggactagcccatcttggccttgtgggtgtggccgtgtgatgtggggagaggagctgttgccagaagagggatgaggaatggcatgggcaaaatagaagaatgaccccagtgctgcaacacagtgggtatggattagaaaaggcttgtaggctggacagggcgaggtgagggagtgcatcatgcattaggattttaagtggctttttggggagtattgagcaggtggcaggggagacaagttcactcagaagttttagacagtgttgacattttctttcaaattgtgcatcttgaattctctagaacattctttatagatatttcaggatcttcctgccactttccacattgtagctattctggtgtttttcttttataattagaaataatgaatagttctcatttgtaggcttggattttcatgcgtgtgttggaaagtgttcgttttgccttttttttttaacttcatgtttttattttttaaaccgtattgatggattcattgctaggaacggcaaggaaaagaatactctcacaatgttaccacgtttccttctcacaggttttataagttgtattatttttatattttcaaagttataatcttaccatctcctctgttgccatacttctcattcatagggtctgtctttaactggactcattgtttacagctagtcttttcatcagatcatctcaaaccctgtattacattaatattttgattccgttttgttggatgactttcatcttaatcattcttattgttgaacaatgtttttcttattattgaacaattgcttcattaggtatagaattcctggttgatgggtgtttgattcagcaccatgaaaattcacggtattctggtatctgtcattgggcaaattcttcttctttttttttttttttttttttgaaaaaaatgcgtggaaaccattagttaccattgacagagctactcatttaatgattttttttttctcccaatagtggtggatgaattttttactttgcgttctcactttgtgtctctcatgaccaaaatattttagagataactagctggctaagtctgaggtggctgttaacagtctggtcctaggatagaacaaaaccaacagaactcatcaccgtcacgtcgttttgactttttgctcacaagtttaactcattgtttaatttgtttttccaaaggattgctttgcagtatacatgttggtgcatagcttaacatgatgataaatacataactttgactgtgaattatctactctgctcctttcatagtctcatgcttctctgaatttgtattttgtgttactgggttgttttgttgttatcattcatagtgttttttttgcccttgattctttgatccaggttttggtcaagggcaaggttcaagagaaaaagtaaaaacacagtcttttatttttgctcttggttataaacccttgtaaagtttgattgagaagataacttggatcttatggtttaaattgagtctttgtttaatcccaagtcttccaaattctttgtgcttatgtattctttcctctttcccaatcgtaatagttttgcttctgcctagtcattggtcaaatacctgcctttcaatgcatttaaaaaatattttgtgttagcaccatttgagatttttccccccttttttttcaagtatgtattgaggactgttatgggatgaatgtttgtgttcccccaaaatttagatattgaaaccctaaccccaggctattcggagatggtattcggagatgatacctttgggaggtgataactgttagatgaggtcatgagtatgtgcccccgtgatggaactagtgcccttataagaaaagataccaaagagcttgcctttttctccctgctcaaacgaagaagtcacataaggacacagcaaggaggtggctgtctgcaagcaaggaagagcggcctcaccagaactcggtcatgctggcaccttggttttggacttccagcttccagagctgtgacaaaagacatttttgttgtttaagccattcacagtaaggcagcattttgagctaagacaaagacctactgtggcttctgtaggcaaaagccctacagacccaaagtgttgtgagaattaacatttctagggatcatgccttacagtggattttatccaacacttagctctgacctagagcacgctagtcgtcgttaggtaaatgcttgtggatggtagtttctggcacagagattggagcggtaatgggcaggagttctgtatccagcttatgctgagagagcttcccataaaatggagcctatactttccttttgcagagaccatttctatccattgatagaattcttttttttctttttcttttttttgacgggatctcactccatcgcccaggctggagtgcagtggcatgatgtcaacccactgcaacctctgcctcctgggttcaagtgattctcatgcctcagcctcctgagtagctgggattacaaggtgcacgccaccacatgtggctaatttttgtattttggtagagatggggtttcaccatgttggctaggctggtcttgaactctagtgatttacctgcctcggcctcccaaagtgctgggattacaggcatgagccactgcacccagccttccatcgacagaattctaaagacatgtttaggcaagagttggtggaatgttggcgtgtagtccagatttgccttcagtttgtttttatccgcttcaaatgcaaaggccatgataattcaatagtaaagtcataaatccatagtatgacttaaaatatttggttgtaatattacaaagtatgcttccaaacacattaagcatgcaaaatccttatattgttctttttgtttagtgtttagggtagtttgtgtgaatcatagatgaccacagtagactgttgagttgttattttcttttgacattctttgatagaaaacagtgcttttcctctgttatttatactagaagcaaaaagtatctctcatagcattatggaaacaactcgaatacaactacgtcaattattcatcttttttttttttttttttttttttttgagacagagtcccactccatcaaccaggctggagtgcagtggtgcagtcttggctcactgcattctttgcatcctgggctcaagtgattctcgtgcctcagcctcccaagtagctgagattacaggtgcccacaccattctcagataatttttgtatttttactagagatggggtttcaccatgttggccaggctggtctcgaactcctgacctcaagtgatccacctgtcttggcctcccaaagtgctgggattacaggtgcgaaccactgtgcctggcagttattcatcatttaacagcataaagtggccacttgctttaataaactattatagtaccaaaattttggcctgaggaatttataaatataaatagaacaaaacaaaaataatattccccttgaaacatattctaaaaccaggggctaaaagttagaattgttagattttattgtcctgtttctttgggatgaaatgaaattttttaaaaaccatagttttggccgggcgcagtggctcacgcctgtaatcccagcactttgggaggccgaggcgggcagatcacgaggtcaggagatcgagaccatcccggctaacacggtgaaaccctgtctctactaaaaatacaaaaatatttgccgggcgtggtggtgggcacctgtagtcccagctacttgggaggctgaggcaggagaatggcgtgaacccgggaggtggagcttgcggtgagccgagatcgcgccgctgcactccagcctgggcgacaagagcgagactccggctccaaaaaaaaaaaaaaaaaaaaaaccacatagttttacttaaaccaaaggctttgggattccagaagaataaaggaagtgtacttcaattctacatctcaagaatctatttcttcccaaatttaatacaggcaaatttagtctatatttattgggcactgttaggtttttgtgtcaggtgttgctgagtggcgggataccattcttggcccataaggaccttataaatctattaatacaattaaattgtgaagaaaatttagaaaattgcaaaggtagaatgaggttgcaaattggagggtcttattctggagataggtggaagctatggcagatttttagcatgaatgctttctggtcaagacacttttagaaaaattagcttgtttccaagagtagattagattggggagagaaggaattcaaattacaaaataatagtgtgaaaagcattgtgggagatcatcctgtccatcccctcattcatgatatcctgaggtgctgtattaagggcatcattgctctttgtcacccgagcagtccaggaaggctgcctgttcagtcttagactgtatcctcacagtcttaaaccatatcctcactttatgatagaaacacacaggcaagtgttgtaagagttacatattgtcagttaaacaagaaattggatgagtccccatactattcttcctcttttaaagagagaacttgggccgggtgccatggctcacacctgtaatcccagcacattgggaggccgagtcgggctggtgacgagatcaagagatcaagaccatcctagccaacatggtgaaaccccgtctctactaaaaatacaaaaattagatgggcatggtggcgcacgcctgtagtcccagctactcgggagactgaggcaggagaattgcttgaactcggaggccgaggttgcagtgggccgagatcacgccactgcactccagcctggcgacagagtgagactccatcccaaaaaaaaaaaaaaaaaaaaaaaggaaaaaaaaagagataacttgaaacaggctcttccagcctctctattcttttaataacatgcagtgcacttcttggagctaggggctagggtctaggggcttcttgaaggtgttgatgtctctggtaacttacactgcagggcaggtctctggagggaactttgaacaggttaagcctcaaatgcaggcagagatttccaattgggaaagttaggtgaacgtggctttatcatctcttttattggtttatgggtattttctctttttcctgttttctttcccaccatttaacattatctgttctctgcctttttaaccttctggctttaaatgaacagttgcttaatctatagattaacaggatcagcaaacaaagcacagcagtgcctgcacaaagcagaaactgcctgttagatgagttgagcaaaaccatttcctttgcccaactttctcctctaaaatacataactgaacatgggattcccagacacgaattgtttctcaacctttctttttccattctacagttgtatgaaattaaaattaaataaaaagcaaacaacagaggtagtctttttaatcttaccgagttggaaggtatactatatacattatcctatggtagaaggtctggtacattcttgaccattattactttgctatgggcacccttcacccttgtaggctgaaaattggcaaatcataggcacgtatacattgtggttttggaatttgaaagatctcaaattcatattgagtgagacagtttttgaatggagggatcaggctgtctatatgtggatatattttatgcatttctggtctgtataaatgtaaggattgctttactgaccgtagatttcttctagggttaaaaagttgaagccagtttggatattttaaaataagaaaattagccctacattgaaagagagaataggaaaatctaggctatgtgtacacatctgcttgtgttttcacaattgtgtcctgtcctatttatttttatttctctcccatctcttccctcccacccacaatttgtttttcattcaacactttgaaattagaatagcttatctatcaaacaaggttctttgacaggattttccaactctgagtatgaaagtgtggatataacaatatatttatatagaatgtcagaagcagagtttggccagattattgggaaatattctaacgccctgcagcattttaccgcctttgcttttacataaggccatcatttggaaacatagcatgctgatacctcccattattgcagtagcgtttcatcagctgcacgctgcctctcagcgcctcattaagttgcaagcagagaacgttttcgttttccagttctctttctcaattaagttagagattgtattttcagtattcctcattattaaaagaatttttgttgagaatagtttaagatgtgatatttctttgtattccaggaaaatttaaagaatgtcattgaaatccagaaacagaagtatatattgtctaggacatgctttgtcttggtttatatgcctaagtccgagtagtttaaaatttatgattaatatactctttgaatgcttagaaatggcatcgattttagttgttctagtttcatcttaaataaattggagtaattactaactcaggattatgatgtgctacacataaaacatttgcagtgatgtctggtacttaggaaaccctcagttatgacatttttcttactttcttcttggatatgttctttgaaaaagggactggtatggaaaagctttgagacgatgaaaatatacaagataggctatctctgaaacaatttggtatagagcatttgattctctgtttcatgtatatattcatatatgctagctgcagtcatgcagacacaatttggatctgggtttttttttttttcctttttcacatgcagttataaatttagaaacctggctgtttcctctggactaaatgtatttatttaaattttcagtgctttaaatgcaaaattacaagcatatgtacaagtagaaagaatagtaaaatgaaccctcccatctatctgtcactgaattgcagtaatgatcaaatctagtcagtcttgttcctgagtcagtctggaatgcaggttttttcccttaactattcaggttctccagcaatcctggcaaaacacatgcgggtttcagctcatctctttcagtgacctgtaaattaagatgtgctaaagcatcacatgttactcattgacgttttgttaatatatttaaaacattttattagtaccacataatttttagcgttttcaaaaagaaataagaatttggctaaaggtgaattttaaaaattgaatgactaagtagaaaagtaggcaaactgttttcagaattagtagcaatttccaattccatttactctgttcattaactttgttttcagccttttgttagccatgtttgattttgtgtttttgaaatacctttggtcattttaggacttttggcattaatcacctgtcttaggtggcctgtttacaaaagggacttttcggttctccatttgcccttaatgttgggaatagagacaaagtttctgtaggactctgacaacatatggctttacaaagtttttttttaatatatacatttctcttcttggctttcttaaatatcatcaatgtcttttcttgctttacgtatttagcaacttaaatgtcatcttgtctgagatcaatatatttccaacttggagagatagtgagaagagagacttcagatttttaaaatgtggaacaaaacattctgatggtgaccaggttttaaggtatttcttcagtagacaaaactacttaggctaccgatgataagcttttaatattaataataattattatatataaaaatattaatataatatgatctaagattgtttctattccccctctttcctggttgttaggatttggaatttcttatgcactctttttttttttttttttttttttctgagacagagtctggctctgcctcgcaggctggagtgcagtggcgcgatctcggctcactgcaagctccgcctcccaggttcacgccattctcctgcctcagcctcccaagtagctgagactacaggcgcctgccaccatgcccggctaatttttgtattttttagtagagacggggtttcaccatgttagccaggatggtctcgatctactgaccttgtgatccacccgtcttggcctcccaaagtgctgggattacaggcctgagccaccgcgcccggcctatgcactcttaaaattatttcatgtactgatacattcactttcaatgataaaacatggctgtatgaccaggtaggtaggctgcttttcagactcctgtactaactgaatgggccccattagcccaagtgagagcttaacttgtcactcttcctaaatgccttcctcagctgagtgcttatttacagtaatctactgcttatagcagatgctatgatttgtataagctgtccatatctacttggaagaacaatattgaaaggcattgagatacttactttccctcaaaagcccataatccaacaactatttagaatatcttatttaagagataggtttataatacccaaagggaacttaatgtatactgaaagtccctgattgaatggattctgaccttaaccagaaatattaattacatgcttatcagacacttactgtgctatcccagggtttgccactgttgagggaacaccagatgaatcatattgtccctgccttcaaggattatatattctaataggacagacagcccatcagcagaataggaggtagcaagtggtcagggatcagataaagtgatcaaggcaagtggaggatgcagtggtaggacagaatggtctgcgcacagagattgagggcatcatgtggtgggaattagtgaactagcatgcaagccgggcctttttcttggcttttgttcaattggaaggagcataaagctactaaaggagcttatgtttagaaatagggcttattgaaggggacaaggcatctcctagaatccaaatgcacatcccaagacttaaaagagttagagggcacaggcaggccctgtcagatccggtctctgccagatccagtcttgtctgtttctcatcttcccttgtctctctgagtattccctgttttcctttcctggactaactgcttcttccagatgcctagtttgagtccacccatggttttttgggggcttttctttgtttttttgttacgttctgtttttgttttttgtttttttgaggcggggtctcactctgttgcccagactggagtgcagtgacgtgatcccagttcactgcagcctcgacctcctcgcttaagctgtcctcccacctcagcctcccgagtagctgggactataggcgcaagccaccatgcacccatgggtgttgacatgccacctgtggctcagacttatgctcacctccagtcaagtttcttccttatctaacgacagcctttgtgtgttcgtgaaagcccttgagggaaagaatgctacgtacagtttggttttcttgggctctaataagctataggggatggtgctgcagagtttgaaatacagtcactaatgagtcctccttcagagagctgagggtgggagcaccacataaaaggagttgggggtcagcagcctcctgatagtctgaaagccaaagatgatggatgtggggctccacggggaggctataacatgccacgttatgttttctgcccttgaggaaagcttcttttcaccaggcaggcagtacagatacaaacttaatagcgatgtgaggcacactgataaataccagaaaacattctgtaagaggggttagcattatttcactgtgtgcagaggaggtttgtccatgtggggggaccctaatgggcgtaggcatttgaagtgtagtctaagggatcttaggtaagagtgtgtttggaacacagtgtacgtatttatacagcaaatgctctgtgtggctataatttaggaaaatttgtaggacttgaggacagcttatttttctactagctgacagaggcttgggtttgcttctgctttaagtataagtatctcgagtccttttttaaaaaggaaaatcaaggaaatagttggaattgggtttcacataaaaaacattttagaaaagaaggggagtatgagagttaggatttgctaatgtttgctgtattagcaaattatttgcaatgcttgtcatattagcaatacatgtatgttttggaaaacacatgcaaattaagcagcttaaggaacttttatctttatttcctatgtaagatttgagatgctgcaaagaaaatattaaaacattgaaccgatacttacagtagtcctcctatatctgcagaggataacttccaagacccccagtgaatgcccgaaaccttagatagtaccaaacccaatatatactatgtttttttcctataggtacatacctgtgataaagttgaatttacaaattaggcacagtaagtaattcacaacaactaataatagaatagagcaattatgacactacgccaccatcactactcttgcactttggggccgttattaagtcaaataagagttacttgaacacaagcgctgtgatgaagtgatcaatggcaggtagcatgtacagcatggagacgctggacaaagggatgattcactttctggactgtgtgggtttgagatttcatcacactgctcagaatggtgcgcaatttaaaacttattgttggctgggcatggtggctcatgcctgtaatcctggtactttgggaggccaggacaggaggatctcttgaggccaggagtttgagaccagcctgggcaacataggatgaccctatctctttcttaaaattaaatataggccgggcacggtggctcacgcctgtaatcccaacactttgggaggccaaggcgggtggatcacaaggtcaggagattgagagcatcctggccaacatggtgaaaccctgtctttactgaaaatacaaaaattagccgggtgtggtagtgggtgcctgtagtcccagctactcaggaggctgaggcaggagaatcgcttgaacctgggagatggaggttacagtgagctgagattgcaccactgcactgcaacctgggcgacagagtgagagtccatctcaaaaaaaaaataaattaattaaataaatagaaaaataaaactcatttatttatagagctttctatttaatatttttggactgaaactatggaaagcaaaaccacagataagggaggactactatagttatgataaaaatcaggaacttaatctagccacgagaacatttgtatttctgatgaaatttttattcttgtctaaaatgttgaactatatttatatttatatctttaaatataaatgaactatatttatatctttataaatgagctatatatttatattttatataaatataaatatttttatatctatgtaaacataaaaaggctttttttcctctctggatgtttactggggttatttaataaaaacctagggatgatattgggaatttttgttggaattttaaattttaacgtgtttgtttctttttttgttttgtttcgttgtttgctttctgagctgggagttggctgtgcatgtggcagttgctttatcaaaagggtcttgctctgcttcagaagaagttttgttaccttgattgctaatgttctcccccttaaataaacctcctgatgttggaacagcaaaattgcattatgtttggaaaatctaaattaataatcccttatctctgaataaaagtaactgaatcaggttgaatttactgcttccattttaataggacagtaggaaaaaactatgcatgggctttatgtggttcaaatttttttttttttttttttgagaccgagtctcgctctgtcaccaggctggagtgcagtggtgtgatctcagctcactgcaacatccgcttcctgggttcctgcgattctcctgcctcagcctccggagtagctgggacttaacaggcgtgtgccatgacgcccagctaatttttgtatttttagtagagacagggtttcaccatgttggccaggatggtcttgatctcttgacctcgtgagccgcccgcctcggcctcccaaagtgctgggattacaggtgtgtgccactgtctccggcctggttcaaattttgtaatctccacatccatctgcatattaacaattgtcattgttggtgttatagagagagaagctgaagcacagaaaataacacgcatgttctagatttcctggtgggaactggaagtaaattctgtgtttggctgatcactgtataaagttctagtactagtctttagggaaaagccccgtcttcatggattttaatttgtcaatttgcaattctacctacttggaaatagtcaacctaatcagttactgccctgttgcaccaactattaccataggaatctgaagatggtatgcaaccaacatgaaaaagagatccttttctcctggtaatcagtttgtaccctacaaacaattcgttggttttaagttgtatagagggaaccatgatgtgaatatgcctgccactgggtttatagaaaaccgatgactcctgaggaaattctcagcagggttgtctttcagtgaaaagaaccctttagaaagatgcagtaactcacactttactgcacataaagtcatgtccctcagggtggactctcaggtgtcatacagtttatgactcatgagtgctgcagctttgtgatctaataaacaagtaaagacggtgggagaattatattcctgtacaaaaagccacttcacctttcattatataggaaaaaagccatgggaatattaaatttttagtggcatttttagagcattttctgtgatctaaagtgcctgcattgagatattaagatacttaagaacaaagtaaaataaagagaagtattaatagcaggatccctttggagctaggttactgtggcagtggtttcaagaataactctctcagcacccaccccaggattctgatttagagatttctttgtgtgttctcttagcatatacctctaccactgagtttatcccctgctgctacactgattgataccttatttttaaatttttgtttttaaaatagacggttttttagagcagttttagattcacagaaaagttgagaggaaggtacagaggtttcccatatacttgctacctgcacacatgcttagcctctcctattataaacatcccccacagaatggtacatttgttacaatcgatgaaccaacattgatacatcattagcacccaaagtccatagtttccctgagggttcactcttggcggtatacattttttgggtttggacaaatgtataatgacatatgtccatcattgtagtaccatacagagtagtttcactgccctaaaaatcttctgtgctctatctgttcatcctccccctgcccccaaccacccaaacccgtggcaaccactgatctttttagtctccatagttctgccttttccagaatgtcatatagtgggaagaatgtcatatagtatggagcctattcagatgggcttctttcacttagcaatattagttaagttcctccatgtcttttcatgggttcatagcccatttccttttagtgttgaatgacattccattttctaggtgtgtaccccacagtgttatttattcattcacagtaccttattttttaactgatttttttggggtctgggactaaggtgaggtaaacaaggcagtcaggaattgagattaagaatttttaatgtaatatttttaaaaatcaaaattactgcaaaaaaactccatgatgaacaaaatatcaactttttagacagagattgagtcacgctcaattgacatcaagccatgcatagttctcctactgccttattaaaatggaagcagtaaattcagcctgattcagttacttttattcaaagataagggattattaatttagatttgtcaagccctctgaatgtcatggacaattgtgagtgaaattccgtgtatcgtctaactccccatggatgttatcttgctcagaaaccttgttctccctccaaggaaggcactacttctcctgtagccttctcaggtcgaagttcttttctcaaaatcctcacagcgttgcccctagaggtgggaatgtcctcttttcctcttcatttcctcttttcctcttcatttttgtttccaaaccactcttcctttctcttccctaaaagcccccctacctcagcttgaagtgcatgctttcagacaaatcactttgctcctccacctgttggtcatctccagacctctttctacctcatcgatgttcaccattcagactttgaagattttagctcctgccttgctgtcatcaggtgtagctgctcatttgctgattcttaagtgatcctaatattgatctcaatgatccttccagtattccaatttgtcagttcatgattctcatccctccagtgaccttgttttcatcattctccatcacccattgcttacaatggtcatattatactccttgcaatgaccaatcactgcaactcctccaaaattttaatttcaattatttgactctccaagtactacttattaccacctcactttctccagtcctgtgcgccatacattctttagcccctggagtgtgatcagtggactcagattccactggtccctaccaccttttacctgtgtctaattcccctcatgttctcacttttgccacttgagattgcatggcccagcattctaatcattcccttgcttataccgtcacttctctattcgttgttatttatctggcaaaacaaccaccctgttgcaatgcaaggtttatgcaagggaatgcacattttcgaaatagatttttatgtttatgtttttctttcaaatctctactcattaataaatagaagtggtttgatatttcacaaatgtgatttaattgatcaagtttcacatttcattctaagtgctcagttaaacaccatgatgtattcacaacagtaatcaaagcaaggggctgtagttagttataggagcaaagagaattcatgagtttatttttatctaaatgacacccttgataacttttcgataagttattttcatgtaaattacttggaataagagcaggatttttatatagaaagctttctatgtgtcatatcctgtaaaatgtttgtccgattagtgagagatagggggaggttgaattttactaaacataatatccccagccatatctactgtaacgtttgtttaggacattacagactattatcctacaccaatttatttcacatcaaaaatcaccccatgcttgtaagaatcctcctttccccctcttgtttctattttagctcccctggaaaaataatattttaagtctaaatgagtacaataaattaaaaagttgcattgcttaatattttgaatggaatagctagatgcttgttcatttgctatctttttctttgtactgaatttctttagcttggtcagaggtagagcaggcttgactcttagtggatagtggtataggttgagtatcccaaatttaaaaatccagagtccgaaatgctcaaaaacccaaaactatttgcatgtcaacatgatgctcaaaggaaatgctcattggagtattttggattttggactttccggattccagatgctcaaccagtaagtatataatgcagatgttctaaaatcggaaaaagtcagagaccttgaaagcacttctggtcccaagcattttggataagggacactccacctgtaccttacagtggaggcttgttagatgcttgtaaatgccagcccctgcctcaagtaacaattgattctttttgtgtgctctcccaggtctaccctgaactgcagatcaccaatgtggtagaagccaaccaaccagtgaccatccagaactggtgcaagcggggccgcaagcagtgcaagacccatccccactttgtgattccctaccgctgcttaggtgagccggccggccgtggggctggtgttgattgggggcctggtcttgagggaagaaaaagaggatgctcctgttaggtcacatacacagacttgttcttcagcacattgccactctgtgttgtactgtgttttggactcttgcagttacattctgtgcactgaccctataggagcagtatttttgagttccctgcctcagaatgaatttacccagggtgtatattgaaattacaaattcctgggccagttccaggactcctgaatgaaaaatgcctatagtagcggatccgggaattcttattttaccgtatcgcatagatgattctcatgaacaggggccttgtgtgtttcttcacatagactttctagaagaaagaatctaatgtgaagctgcagcattttgttaatttctaaaaaaaaaaaaaaaaaaaaaaaaaaggctgttctacaataactactcctcttatttggtgatagtagaggaattggaattgggaaggctttttttctgcttacatcaaactggaggaaacagtctgattactaatgtttaatgtttgttttgtcacaaacctcaaatttacctcaacattttatttaaaaaaattgagtagttttatgtggtatcgtgctcttttcctctggaaactgtcatactccatatttaatctaacttggttattagtctgttcctagttgttgtttttatgtgaccagtcattgcagaagtcaagttctttgctctggtatcttacatctagatgttttccacaagtgtattcatcagtaggcaggttgtaaataaggatatagagattgtctgtggagattgtggacaaatattgatgtatattctgatgacttcttataaaggttaaaaggaatatttcaaagaaaatccaacagcaaacttacaaagtaaggatatttactgaagattccggagatctatgtaatatatggtcaaaaatgaatgtcctaagagcatactgattgctgttcattcatgtgcataatttgagacataaaatgaaaacactgggcattagaaagaagatttcacctggtgaatttacttacaatgtaattgatgaagagagtgtagaaaactagatttcttaaacatctgataattcaagagtttcctttttcctccttattccttgttcctatatgctttataaggcctcaactcttttctggttcatcaaaaagtgcagtttaattagatgaaaataagcagcacttaaattctagatacagaactcctactcaaaaaaatatagaagtcatctgtccccaggaactgtgtattttatactcacttagttattacaccaagaaataacacacagagattgaacaattcagtacaagttaggaagtagatcatgagtctgttaatttgatgggccaggctttgttaatgatttgtttcttttggttcttacttacctgttctatgaagtattccaaatatattttcattagaatgtaagctcactgagaacaggtagggctttggatgggcattattgctcctggtatgacactcaaaactgcagtcatgtttcagaagtgaacttatcattttacatagatttttctgcttcatattctattcagaatgatttgtattaaagttgatggaaagatgaaatccacattaagattgttatttactacctagtgccagttgttgtagcaaatatcctttgaaccccaggtctattttatcctatctgttgatcacttcctttgcccctgctcttcaagcctcctcatctctgaaaagctctccttccactgggtgtggtggctcaagcctataatcccagcactgtaagaggccgaggtgggaagattgcttgagcccagcagttagagaccagcctgggcaacataatgagaccccgtctcttaaaaaaacaaaaacaaacaaaaaaacctccaagtgaacgaacagtacaacaagtaataaaggatataaaagatgttctcagatctcaatatcaagtcagaagattttataataatattataattacacggagactgtccaaatatttgtatttgttgtgctacactgcattatgcaccatttagggaaacaacagcctaagtaatgtggttttaaataattaatctcatctaccaaatacctgtttgatagtaaagttaatgacctgtcctcaccttatgtttttaaccattatggaaagagaaccacttgaaaatatatcattccactgacagataattacccagctgtgaagcacaggctggagactggcaaggagaaatggagagaagcctataaaataattctttctcagggaaggagtttattcctgccaaggctttgccatcaaccattatcagatttctctttcatcctccgaacagattctgggctcctttgatgtggaggtacataattcaaaaagttgggtcacttgtgacatgttaagcaaatttctcagttctggttgtgtctgatgtgaaatgagcacgttgacactaactgttcttgactactatgggactagataatcatttgctatttcctgtaggtacttggcgtgttgaatcattttaccatattttctcattttatgaatcactggtccttttccattggacctgaaattagaccctaatatgacaagtagagcatatgttgtctcttactttgttattaaccttagattagaattaaggaatataggtgctgcttttttcttaggtagtggcaaattttccaaaggtctcaagcccagagtataatacagagttgataaaataacctggtagagtatgtagagcatgccttgtctttcaggaaaaggaactgaaaaacataggttttccaataggtgtaacataggtaacatagggacataggtgtaactgatgtacattttacttgcacttaatagacaggcagtgttagttcttcgtctctcttcacaggctatacaactaccaagatccagagaggttgaatttcttgctataactcacagcaaataaatgggagagtcagcactacagtccaagctctcttgattattggtccagtgttttttacagtatacacaaaaatttgttttaaaacaaatattcactatgaattagagacaatagcactaaaaaagaaactcacagctatcgttgtgttgacagaggagacaaccatgacctagtataggataaatctccatgtgatatgttttctactttatagtagtagtaggtaacattcttacatattattcctgcttaacaaagaattactgttcagcattaacataagtatgctctaaaatctcttgactgtatccaaatatatgttttagacaagagttttttttttttactgacctagcaaacaaaataaaattatcttaaacattaagcgtgttaaaattcaaaacaaagcttgaagagagaaaaatgcttgttatgtgtggcatacaaccttcctaacctctttatcagatgaaggatccagtgtggcactggattatttttctgtaatattttgcctcggacatatgtgctatacatttcttgtctgcatggggaaagtatgtcaggttgctgttgccactttcttcccatggagtggataatttcccttgagaataagttggctttctcatctcaccctttgcttttggtagtacctctggaaccagagggtaagattcatcttaatcatgtgaacattttattaattatctcatgtgtgattcaagcacatcattactgttactcaaggagaatattttctttgcaaagctttcaaccctttccatttgaatgactgctcttcatggtgtaatagatccactgttgaaattggcacttttctgtacttgtctctgaccagcaaaggcaaggaacattgcgtaaaataaattactgttgaattattggggcaaagtcaggttaatagcttaatccaaaaaaggaattacaagtgaaagaattttaccttaaatgtcattctgtttcattttgtaattaagaccttccaaatgtgtaagtagtaatgaccagaaatcttatcagatatggtcaaatgagaaaggtattcaattcatattaattttgaattttattgttttaatacaattttaggaaaagcatgccttgttttctgggtttcttggctgcctttgtatcaattatctacagctatcttctttagcatggaaaggatgtatttgaatactgtgacattttataccagggtaattctttgaatttatgtaaacaacaactctcttgagacacatcagtacaacacaatagtcagaaatgtcacatgagagttcaccaaactttaaagatggcgatgaggatggaaaaacatttttattgtagactttaaggatcttgtaaatccccgtatgtaatccagtgtgctagagaattggtgcccatggcgcctcctctccccaccgacctgcactgtggaaatcctactaattttgaagtcatgggagatgcatgtgtgggacctatacatgcactgtgatgagaatgatgacttcatcattctcattatttaatgagcccagctgctgcatacaagaaggatgcaaattcttgaatgttcttgattgtttacatcatggtctcataaggaatgaccagaattgctgggcatttcttcatcaggaaaggctaatcagccatccttggagagacatcagactcctttatatgtggccttcccatgggacctttgaatggtcaacgttaatcatgcttcagaaccagcatactaagtaaaagaaaacatgtccggaaaagaaatcttatcagtgtttatctcccaacagtgggattacaggtgattttgattttatttaagcaattttctatgactttgtataataaatgagtagcttttataatcagcaaaagatagactatgaaatcagtacatataattttgtatttgtatgtagtaccattgaaggataatagaaaaaagtcaaaagacttgaaagtcgacacagaatgatcattaatttgttttatctcttggtagttgtactttatgagctttatacatacagtatgggaaaatacactttagttttgaaaacaccatgatgccaaaataaaagaaaataacgttcattcatacgatcttcaacaaaatttaagcagcattaatcatcactgattcttcaggaagattcttgatcttccttaattttttttccctccaaaattgcatatggcagccacatttgtttcaggccagaaggaagaatgggaagagcttacatttatctcacagattccttctgggtgaggaagacttagaaagtgaagccctcttccatttgattaagcaagaacacctataaaaatggtgtcttcggccgggcgcggtgctcacgcctgtaatcccagaacttcgggaggccgagatgggcggatcgcaaggtcaggagattgagactgtcttggctaacaacggtgaaaccccgtctctactaaaaatacaaaaaaattagccaggcgtggtgcgggcgcctgtaatcccagctactcgggaggctgaggcaggagaatggcgtgaacccgggaggcggagcttgccgtgagccgagatcgcgccactgcgctccagcctgggggacagagcgagactcagtctcaaaaaaaaaaaaaaaaaaaaaaaaaaaaatggagcccttctaggtaggtcatcctccatggctcactgcagcacttccttggccctgtcccaagttccataattgcctcaattgcattggctcctgcttgatttgctttctaaaactcaggacagaggatgagttgaggagactgacttttttaacaatcgcattttgaaaagaaggaagcgtagtggtgtttcttggctccgtttccagttttgtttcttttcattttaattattgtacctggtattgtgtcctctttctgggacttttaacaactaatgttttgattgataagagctctaatagcatgggtgatttatacttcattacatcttcagttttgtcttctttactggagttgtattcaggtgtcattaagtaacgaggcattaaaaagaaacgataacttttgaaaaactgctgttatggcttatgagtgggctttgctgatattttcttgaagcacagaatttatctatctctgtaggtcctagatgataggtgagaaaaagaaacccagcttatttggcatgatattgtcccaaggcttgttagtaattgctttgaaaaatgaatagcaaggctaatggacatctgatttgtagtacatgctaagaattgcaaatgtgtgctcaaaagaaatttctctgattacaaaagtaacatatattcaacgtacaaagttgagaaaatacaaccactagctaaaaataatcaaaaccatttggcttccttgcagtctacatttttttcatgtatgttttgcttttgtttttagtgttatttaatcgtttcctgttttgtgacttgctttttacacctaacatttttagaatactctacctgtgaaattaaatattcttggagagcataatttttaatgtagcatcacaccagacactgtaatgtgtttactcttttttatggtcatttaggtggttttctttattttgtggtggtgtaatagttgttataaatgatgctgtgataaacatcctggtagataaatttgtgtttagttgatttttatataacagttattggcggaatgccttgcaaatcttatagttggtgtaataaaatatatgcgccacataattgtttatgaaaatatggaggaaaattttaatactgatttatgatcctgagtttaacataagcatggatacccctacatttagctatgatttttttattgatagagtaaaagcgcctgtaatttctacttaaggccatttaaaataattactatttaaatctatttaaacaattttaaatattgcttttccaaatttccaccttaggaagtagttaattgaatattctcagagaaataagtcctacaaaattgaccaataaaaggtcagttacgtattcattgtgtacgttttattgatcacccacagtgtgtgagcccctggaggtgggtgaaatgtgggcctccctcttacagagttgatagtgggcctgaaggggatgggatttcagctcaggaatttaaggaagacttgacaggaagtagcattgtgagccaagatttcaaggataagatttcaaggcaagaaaggagatgtattttaggtattcagacagagggtcaacaaagtctttaaggtaggaactagttcacttttcaaaaagaagaggtaattggtcatgataagagtagtagtttttaaaaatcattactgttttcattcatttataatgaatactattattttataattttaaagtttatatccaaataattgttttcaagatggtaatgaatgtatattgcttttatgtatacacatagtactttttgctttttggtaactaagtttataatttttgagggcaggaaatatttttgtttttcacttacaaagaaactatattttaataagagttttttgacagcagtgctttatgccaaaggaaaataaagcaacatttaacatatcaaagaaagccaatgcaaaacaaggattatttatttatttatttattttattcatttttgagatggagtttcactcttgttgccccggctggagtgcaatggcgtgatctcggctcactgcaacctccacttcctgggatcaagcgattctcctgcctcggcctcctgagtagctgggattactggcacccgccaccacgcccagctaattttttgtctttttagtagagatggggtttcatcatgttggccaggttggtctcaaactcctgacctcaggtgatccacccatcttggcctcccaaagtcctgggattacagacatgagccatcatgcccagccaaaacaaggattttatattcaatcaaactgacattcagatatgatcacatgaaataaatatcaacgtacaataactcagggcatattttcacattattttcctgtagaatctgctagagaacaagtttcagatacccaaaatacctagagaaaaactgatataaggatgggtaatgagcattaaggagaaacataaaaactaagactcaacgatggtaaaaagtatgataatatagtattccacagctacatgctgtgacaataaagagattctgtaactgtcaggcctctgagcccaagctaaaccatcccctgtgacctgcacgtattcgcccagatggcccgaagcaagtgaagaatcacaaaagaagtgaaaatggcctgttcctgccttaactgatgacattccaccacaaaagaagtgaaaatggccggtccttgccttaagtgatgacattatcttgtgaaattccttcttctggctcatcctggctcaaaaactcccccactgagcaccctgtgacccccacccctgccccccagagaacaaccccctttgactgcaattttcctttacctacccgaatcttacaaaatggccctaccccatctccctttcctgactctttttcggactcagcctgcctgcacccaggtgaaataaacagccttgttgtgacagtaactttaatggggaagaatgagaagaagatgtgggtaaagaaacaactgtttttctattaatggtggtagtattagtgtgtaattctgagcctggtgcataagtaatatggtgtaacataagtgaatagttgtgtgatattttaattcaatcatcccatgtatttgagaatcagaattttgatgtggtaaaagaagattcacatgtaacatataatctattaaaaagataccctgtagtcatgagtttgacttttaggtatcatttctcagtataacatattgttgtagatttcagataacattttttccccataaatactgtccgctgcaggcctaaaaataatgaaaaggcctaaaagaccaactcagtagcggtaaacaccagtactgcacctagattatggtctttaggaaccattttccagtaaaagataccagtaatctttggaaagcaggatttttttttctttttttttttttttgagatagagtctagcttcgtcgcccaggctggagtgcagtggtgcgatcttggctcactgcaacctctgcctcctgagttcaagccattctctgcctcagcctaccgagtagctgggattacaggtgcctgccaccactactggctaatttttttttgtatttttagtagagacggaatttgaccaccttggccagtctggtcttgaactcctgacctcgtgatccacccgcctcagcctcccaaagtactgagattacaggcatgagccaccacaacccggcggaaagcaggaaattttttaaaagctattttaattcagtcatgtaaaaaaaatgagcagaaagaaacaaaaaacttaaaaaaaaacttaaaaaatgagcagaatcttaggaatcacctgcgactttggttattcatgcttagccatttctataggaaattccagcactatttgagttagaccactaattatatgtgtgttgtagctttctccaagagataatggaattcacaaatcaaaactttgagattattaagtgttacaagtgaattataaccccagtcatttgctttcaaatgaacagctaaacatattttgtgttaatttcttatggatgctgctttgtttgtttgtttgtttattgagacggaatttcactcctgtcacctaggctgaagtgcaatggtgagatctcggctcactgcaacctctgcctcccgggttcaagtgattctcctgcctcagcctcccgagtagctgggattacaggcgtgcaccaccacacctagcagatttttgtatttttaatagagacagggtttcaccatgttggccaggctggtttcgaacttctgacctcaggtgatccacccaccttggtctcccaaaatgctgggattacaggcgtgagccaccattcccggcctagataggcttttagttggtttccatatacagtgtatatagggagaaacagactaagacagacactggcatccacagaagtaaaaataaaaagtaaggtataatttaaatttcacacggtcatggtcacatttttcagctttttgcacctatgttgtataaaaaagacaaaaatgcctttagaggctcaagttttcaggacttcctgaagctgtgtcatagtttaaaaatgccataaaaatgccgtcagatttaataacgtatcagctgaacactggatttctgttatgttgagtcttcaaaaatttctccctgtatgaggaattaatactgttatgtctgatctggtggtctgaaatgtgaacttttctgggccaaccagtaaacagctgctgttgctttatagctgcgtaattcagtcttggaaattattagataattcccacaccatttcagcttgctgttttaccataaatttaatgtgaacagtatttctagctaacctcaagctgtgtttattgtcgtggaattttctcttttattctgaggtaaatgattacaaatggttatgatgaggaatcaaagaagaaagtggactttcttcaaagttctttttctactctagccgcttctgagcatctttctcaagcactgtgtttccatcagtccctaccccaagcagagaaaggaaacagttttcccctttgtcttcagaaccctcttctcatcgtgtcattttccaaagcaaataaaaatcttgagatattgtcttgagtttgattttttttttttttttttgagatggagtttcactctttgttgcccaggctggagtgcaatggcacaatctcagctcaccccaacctccgcctcctgggttcaagtgattctcctgcctaagcctgccaagtagctgggattacaggcatgtgccaccatgcccagctatttttctgtttttagtagagacggggtttctccgtgttggtcaggctggtctcgagctcccgacctcaggtgatccgcgcctcggcctcccaaagtgctgggattacaggcgtgagccaccacaccctgccgagtttgatgttttttttaaccattcaagccagtaaataactttccagacagctgtagtagaaaacagaatttgtgtgtgacaaaacttaagattttgggattgagagctctatggtttatgccatgtggataattgtagccagatgaagaatatgaaatttaaggaagtgtttagagtggtacagacagctattattacgattcttggggtagaagagtagcttacatacaacataaaataatggcattaactgaattaacttcagcctttgccatgaaacccaagctttcattatgttttaaataatgaactacattaaaaatagtatataaatatgtaaaatatattagacatagacttctcataataaattatgggaacttttgatgtatttcttccctaggaaaagaactaaacaagtgcttctttgtggacttaaaatttttcagtttactattgtgaattaggtacagcatatctttataattccagataatacccataaaagcagaactgtttatttacttattatgaagggaatactgaaatgaaattaaggacaatttttttctcacgtattatatttttaaaaagttatttgatgtttgtgattaaataaagaatgaatttttaaagccagttctcaattagcactgaggaaaagaatatgctttttttcaggtacacaaataagcatcatggatataagaaacgacataaagatgaatctacagtctggattaagacgtattttaatttcagtgtcaaaggctgttaggaaatattcagattttagtacttgacaaagaaggttctcaatatttgtttcagtgttcagtgaaaggataaattctgtcgtctttctcttttatcatattagtcactgagtggtttcattaaacattccctcttccatatcccctgataaatttcaacttgttggtgatgcatcccaggagtgtctgtctttttttttttttttttttccttctcctgtcagtgagtcttaggctttggctttgaaaccctatagtgaagggaaatctcaggcaacagctgtgcaaccgtctggagagcagctagtccagattggaggagacgaacgaggctggtcgcaggagagaggcctccaggaaaaaatggcattgatgcattacctgcgttaaagattttcctgtacttagcatgcttcttagggttctactggagcgtttgggaaagatacagtattgatggatgcatagaaaatgaggcaaattttttaaatggggcaaatattaactgtagacaaagaaaagccaaaagtacaaaataacagcgttgtaagatacgaagataaaaatacgcctaagtatgagcgttctggcagactcacaatacagatgccatatatggggtaaaaccataccagtaggatggtgggaagggaaaggggtgggctcatgttccatagtgggaagacctacagcggaaaaatcaggagaatagttatttaagcacagagtttagggagtaagttgcagaagagacaactaaatgagatggccgtgaatgatttttatgacctcctcttgttatggagaaatcgatcaaggaggcctatatttgatggcaggaagaagttgagtttaaggtttccagacatttgttttaatctggaaaatttctttttttctttctttcttttttttttttttttgagacagagtctcactctgtcgcccaggctggagcgcagtggcgcagtcttggctcatcgcagcctccgcctcctgggttcacgccattctcctgtctcagcctcttgagtagctgggactacaggcgcccacaaccacgcccggctaattttttgtatttttagtggagactgggtttcatcgtgttagccaggatggtctccatctcctgatctcgtgatccgcccacctcggcctcccaaagtgccgggattacaggcgtgagccactgcgcccagcctaaaatttcttttaagcttagaagttgcaagtcaagttactgttaaaggcgtcctaactttgaattagataaagctaaactgtggtttaattgagctgagtttgttgtatgctatatctcaacttcacaagatgtttgctttttcttggctataacctaagattatacaaatataaaattacctttatgcccatttgatagactttagggctgaatttccctgtgtaagatgttgtagaggtttgtacttgtgattgtttttactctagaagcatgtttatcttcactcctttagtgacacgtgtttgttcaggaacttcaaactcaatgtgatcaaaactagactcatgttccctgaatagtctctcctgactacaaatctgttggaaacttccaatcctaattaataattgtaaactttttaatgtaagtcatatgaggggttgttgtgagcataggaggtagggagatggtagtgtgagctggagcatatggtaaaagttgtttgaaagaaagtagacccatgatgtggatcctgagggatacgtaaagaaaatgaagaggtgtagatttaaaaatgtttatggggcctgggcgtggtagctcacacctgtaatcccagcactttgggaggccgaggtgggcagatcacctgaggttaggagttggagaccagcctggccaacatagtgaaaccccgtctctactaaaagtacaaaaattagccaggcatggtgatgggcgcctgtaatcccagctactcaggaggctgaggcaggagaatcacttgaaaccgggaagcggagattgcagtgagccgagatcgcgccactgcacgccagcctggatgacaagagcgaaactccgtctcaaaaaaaattaaacaataaataaataaatatattcatggggatgttccagggaaagtagtttgtgttggtagccttgagaaataataatagaaaattagaatagaactaagttggttcattaaagttggaacacttgtagagatttttgatttggacagacattaattcatttgattatttctcttattcgatgtccagaaaaatatctgtacattcaatgtggttttatttgtactgcacatgtcattaataggctaaagttacctctaagatacctgctttcttagtccttgttacgctgtaaattctgggcatcaggatatagctttttattatgttagctcttttaatagatgatacaattggattggggaaaaaactgattatactctggagtaatactttcatagcctgtagtatcctgcaaatagctcctggtcatcttcgaattttactagcaaacttgtagggtaataggttgggacaaagtattataatcagtggctttgagggcctgataagaggaaacaataattgtgcagctatattgtgaataagtagtgcatgatgctgatggttaaccctttcctgcggtgctcaaacattgggaaataattgctttttgttcaaaatgtaagctcttcgataattgagacttttgtcaattcactgaaatattcccagagcttgaacatgtctggtacatagtacatatttaataaatatatagatttaatgaatgaattgaggatgtagccaaatattggaaaaggaaagggaaaagaaagaatagcccaaacattagaaagacagaagatgtggagcagcaatttcacatgcctaaaagaatttctgagattatggcaaaatcatttactttacttactccttattgatcaacaaaggaagagcaggttttatgtaacaaccaagaagtaacatagggatctcagaagagaagaaaccaagtgtctttggatcttaataaaaagaacattcaactccagaaatagggttaaacctatcctacacatgtctagtaaaaagtcagtgtatcagaggcatctgtgtttagagataaaacataccattagattcatttataatagtttcattgtccttagtttttaaggctaatgataaagatttttttttttttgtgagacacagtctctctgtcacccaggctggagtgcagtgacgcaatctctgctcactgcaacctccgcctcccgggttcaagcgattctcttgcctcagccacccaagtagctaggactacaggcacacgccatcatgcctggctaatttttgtatttttagtagagagggggtttcaccatgttgcccacgatggtctcgatctcctgacctcaacagatctgcccgcctcggcctagtgctggaattacaggcgtgagccaccacgcctggccttaagaattaattttcacagaaatctgcttctaaatattattcagtgataatagattttagaaatttcagattcttatgttgtaccttaaaggttaggatactatttataaatgctaaacatgaactcctgtcatcctattttaatgtctttattaagtgattacatgaatgtggcgtttcagtaggtgtttggtgtattaatagatgtaggtactcccctcttaaacctttaagtattttcatgccatgaaaaatttggggggcattctctttatttattgattaggtacctgtattttcaagaatattactcagcttcagttcccccaaatcttttttagtgttaactaccttccgagaacgtggtataacattttaaaatatattttttgaaggtttggatgtcactgaagatccccctatttattggatggtatctttatcagctgggaagataattagtttcccaatgttgctatatttttatgaataggtcctgtagctcttgctttcttgaaagcttagaattgattgtaagccatggactaatgatattctccaagcatatttaacatgaataggctcatgttcagtatgtcaagaagttaccctgttgtactatttaaataatttgagcttagttttctttttccacctttgttctaaattcttaggtgagtctgaattcctgggcatctgtgcacacagcttcttcagtaggtcctttactctcattgtatctgatctttgacttcataaagacccttggcctactgaccctgtatttaatttcacatctcaatagtatttagccttctcatatttttcctcttctttagagctccctgatccctcactccagtcattcaactctgtgtattcctttaacttccaccctcgctctgtctcttcacagatatgcttctttatatggtagtcagaagttcctgtgtgatcttcgtaacctccagttccctccacagtcacctgttatcaggcatctgttccttgagctccagggaatgagctctttgctatcattctggttgtcggactcactgggcactgttgtgtcctccacagtctctcagtggcatcggttgatgggtgcattctccccacactgatgtcattctgctgcttctgattttctttctgctgtcctccattttcctttcaggctcccttccccgtcctccccgcgccaccttttgcaatatttaggattcagaaattccaaatattgcaaaatatttagaatcagaattcagaaattctaaatatcagtgtttaataggagtaccctggggttgtccattttctcacacaacacatacttgctaggagatctcataagtgcagtggtttttcagaggcctgcattgatgattcctgagtcattatgtccaggccaggcctcatacatactatttactggttctctttctgcgggtgctccaccaagaattcagactcaatggaatatttcttctaagatgtacaccagttccttatcaaaaaatggcaaattcagacttcttaggttaaacagagaactcgtgaacatggcatatgtctgttattccatttttctctgttggcttattgctgagtaccatttgggataaaaatctgtttcaggcaaaggataggattgttttcagcttttattaaattctcctagacccttgattttatgcagagaactaattaaatttgaatgaatttaatgtagaaaccctgctattgatgcagaaatcaacctgattctggactagcaccagaatcaactatttttgttgtttttgctttctttttttttgcttttgctttctctgccggtaaataacaactagtatgtaagaatcaaatgaatcaagcataaatccctaggaaatatttatgcattcatttttaacaatttaaagatgtgaagatatataattaagcataatcctctcaaagtttgacgttgaaaagtatttcagatacttcaacttaaatatattttttgcaaaatatcttttttaaaaaaacagatgtggtctcagcaatgtaattattacagtgtgaggagagcttacagttgtaccaaaatttataactaggaagaagagaatgtgaaataatccggaaacctacaaaactgtcctatacaggaataccaattaaacagctactaaaaatgagtgtaaaatgacaatatggctttatcaagtgcttagggtctggaaaaatgcacatattgcctgttatttattgttatacttaatgaatgttcttttgcacgtgagaactgttataaaagatgtcttttgtacatacttggtacaccagttggctttttaacccattagctgttttcccccaaaggtggcctactctagatgacgttaaaaatacacattttccagggacttatataaatagtcaactgccctattatggaaacttaaaagcgaaggccctgaaatatccagacagtttgaacataaaccaaaaatgaagtgaatctctagaattgctgtgtaatagcgtgagtggggagggggtccctcaagagagggaactgacctttttcttcctcgtgggtgaccttgagtacacactttatttagtcattaaaagggtcacctgaagcttagagaatgaagatcctacagcctgttaattttatcattgttagaaactctctgcctttggcctgaaaatggtaaatcacctttcttagaagattctcatatccagatattcttaccaaatcagaatcttttccagcattttcttcaaaaaaccacagttctgggttaaaacacagcagatcctaactgtaattttcctttcatgtacattttagtcatctttataattttaaatgaaagacaggaactacattatttgaaataagggttaaccccctctaattataagcattaatcacacacagttttctcatttctaaatgttaaatataaaatgggagctatctcttcagacacttttctgttgccttctgtgtgcggcaggaccttacttttaagcttagtttgatttaaaggctgagtttctgcttgcttggaatgcttgctcttcaaaatatttgctccctggagagggaaactgaagatggagctttcacgtgactttggattgctgacctggaagacgtttggggtaataggatgggctagggcatggttccactgctttctgtttgagtggggtcaggaaaggaaggcggggctcgctgtgtgcaaacaggaaaacatagtctgaagatgtttgaagcctgagtgcactttcatttgatgccttgctttattgcttaagagaattttaaactgccgaatccgcaaatgtgctgcagcctataatgacacatatttaaatgatttttgcatctaaacaaatgcattcactctttgcctggtgtgtacaatttgaatgacactcgtgctctgcctggaaggaacagacgtttttcattataaaattcagtcaagcagaaaagtagcaaaggaagcagaaatttccatttacatctatgattgaagttgtagtgataaaagaggatgactaagttgaagagtagccttgttctcattctgctatctgacatgggatcttgtcactttggtaatagtttttaaacttacattattgaggaaggctctgatcagaagtctcaaattatacatgttcttcaaccttagatttttctgggtgttttgtttcaaaagtctcaaattatatatgttcttcaaccttagatttttctgggtgttttgtttggttttttggttatctatagatagatttgagtatctctttttttcttaaaatccgttacttactagtaataaagacttaagtggtagctttacgctccattatcacagagattcacagtactttttagtttttacttgtgagcctcagcaggtgtagacagataccttagttgccactgataacatccagttgccactagatcaagaaatggttcaaaattctccaggggcattttctgctaaagaagagttggtgatcttccttttggaagccttaatgtacttaaaccttcttccttagaagtccagaaattcaattatttcagctctctgtggagtgataagtcctgccaaattgatttacaataatgaaactaagccttgtttacaaatctaagtggtgatttctaagtccacagaggcgtggtaacagagagagagattctgatttatctgggggtctatccgtgtttgaacagattgtgtgatttttgaaacatgattcaaaagggatgttgataaattctaaaatacatttttattgaagagcttgatgaatcatgtatacttactttatttgttattctattagatattgtcttcctcatccctaggtggtgttgctagtacagtgacagaattcaaatccttctttttcctctgctctaacagagctttgtgaactcatagcaatattgtaatgcctggtaaaaggtggtgccagtttcaagtactatatcctaattacttcatggctaactcttgttattgttaacaatattgttaactcttttgttaaatgcagtgacatcttttttctttctcattctctgtgtactttttgccctaaatagttctgcatcttttaagatacaagtttgctttttcttggaggtttttatttggaaaatgcctgaaatatatagaccaacatttgttcctccaatggttaaattacattgtctcccaaagtgaggcattttaagtctggactatacccaggagaatctaaaagaggcagttaataagctcttgaagagcacagtggggtggttgtgtatttattgagtctcacacttaggagagaaataggctggaccaaatgagcctgggcatcaaaagcatgtgggtggtcgttggtgatatgtgcagtgatgagtgtgtgtgctgagggtcctagaccaggctggcagggaaatgaactgaaggcagtgaagcctcccctgataactgcagagagtgctgcagcatccaggacctcaggatcatgatgaacaagctgtagtggatggaagggagaggaactatgggaaggatgagtttctggccagaaagtggtttactggagtgctgtgtctgagtattacatgatctgaggaccatgaggtccagctttgggagtatggagagtttgagtggagtagagttatagtcccatggtcttctgattcacagacattcatgagcgataagtatctattgagaaagtggaagcatgatttttatgacctcctcttgttgtggggaaatcgatcaacggggcctatattggttgggttctacaaccaaatagaatgtgttcagcaggagtcatgttttgggctcctcacaatgttcagtgttagttctgttcctttctcttgcttccacataggaaagactttgacccaatgaggaattagtcattgtcctttgggtacacttccggaatttgataatcagttgggcacttgattctagtacatttgctaaaagtaattaataccctgcaattggaagcatgcagcaagcgactgggaatgctaagtgaaaggtcagaattgaaagagtggaggaggctgttgacccttaggcatggatgatatgtctgagtgagaaagcaagaagagtagaagacagagccttactttataatcagaattatgaaaagaggagccaatgagagggaaagaatgattggcttgagatagattggtggaaactggagaagattgaatttaaagaagaaaagtgggccaagttcagtggcccatgcctagaatcccagcaaattgggaggctgaagctaggagagttgcttgaggccaggagtttgagatcagcttgggcaacgtggcgagacccctgtctctacaaaaaataattaaaaaaaaaattagccaggcatgttggcatgtgccggtagtcccggctacttggaaggctgagacaggaaggttgtctgagcccaggaggctgcagtgagctatgatcacagcactgcactccagcctggttgacagagggtatccccgtctctttaaaaaaaaaaaaaaaaagagaatgtggcagagtagtcagagaactggagggctgagaagagactgatggcatttgttgttcttgaccttgaaagaagagttgcagattgttggagcaaggccagatggtaataggttggaaagaacaagtgaggggcgtgagagtgacagtctacaaccccgttaagaagttatctgtgaaaatgcctcttcctgtcttgattatagcctccctcgcacatggctttctgagtatggtatgtgaaaacagcatgctgtatatttttaccttcccatatgagttaaggttttggtaatgacttgtggttcttttgcctcacggaacaccaacctggttggtattttgtcggcaattatgtggtttttaaaaagccccgtatataaccttaattaattgcgtctctaaaatctatcaggctttgagttttttgttttttttttttaaataaggcagaaagaaaggaaagtgttaggagaaagcaaccagtgagaatacctatattttgaagaaacaaagtagggaatttagaattatctctactatatctgctttttcagctcatctctcgggatacagaggactgaactaagctaaagtaggttcaagtctaaaggaaaccttaaattaatttctgtattagaattaatcacacacctataaatacaatttatgatatgagaactgcaacaagagaaatggggggagatgagcagtttgctgatcaatagggttaatgatggtaacatagaatcctagtgatatgcctcccattgactaaaatgtatgcgttaagatagcatagcgcataaaatggtgtactgcagtctcagtgtattcaagcttattatggtttctctgcctaggtttgtgtctttggctttagattttctcccataaccccaacctgtccacattcaagtcactactccttgaaatatattattgatctctaaaatctgatgctaagtctgtcttgcccaacggtggccactagccacccatggccattgaatatttgaaacctggctagtccaaactatgctgtgagtataaaaaacccaccagatattaaaaagttagtctgggagaaaaaaacaaatgtagaatgtcttaatgataattatttacattgattgcatgttgaaatgatgaaatttaggatgtactgggttaaaatatattaataaaattaattttacctgtttctttttacctttttatgttaatgtggctacaggaaattttaaattagatatgtggcctctattatatttctgtgagacaaagctgctccaagctgttttggtccagaactatatctcggttcttttgtatcctacatggacctgcatagaatggtatttagtaatactcagcagtagcagagatgatctcttatcaaattatgttaagttttaatttttattcttgtctctcaccctatgtgcacctctctggccaggaggcatttatcatatcaccttttaatatttggaaatcacttgatctgcttgagtcattgtgttgttttcaaatctagaactctttctaccttattttgtaacttctataattaaacaaaaggcgaaccaggagcagcttggctcttagggatgtgtgaaaaggcgctcagtccttaagttggtgccaaaagtgacaaatctataggatgagatgcaggtttatggaagagaagcatgaaaatttttattttttaaaaggacacagcaagctagtcaccaaaagacagatacttgattctacttatatgcggtacctttttgaatttgaagagtcaaattcaaaaagatggaaaacagaatggtggtttccaggttctggaggtgggggaatggggagtggaggtgggggaatggggagtggaggtgggggaatggggagttgtttaatggtgtgcagggttttagtttagcaagatgaaaacagttctggagatggaaggtagtgatggttgtacaacgatatgaatctacttaacactaaactgtataattaaaagtgggtaagcaaagagtgtcttacaaagcaataacttgtaacttaaaatttttaaaaaccttaatgagattagttgtaatgggttatcttaagtagacccttactgccggaaggaacagctgaatcacatcacttgggagcttgttagaaaagcagactcagtcccaccctagacttgtccaatcaaaacctgcattttaacaaggcccccaggtgattcataggcactgtaaagcttgagaagccctgctccaaatatcatttctcaaagtgtgatccatgagccacctgaagcagagccaccctgggaaggtctgttttcaggcgcgtcccagaacacgtaaatcagatctaggctgtggagctagggagaagatgaatctgcagactgatcaggatcccaggtgattttgaagcatggtttgagtttgaaaacccctaatctggaaagctttaacaactattactcttacaattccatcttttaacgaatgttggaattattaaatacttgtaacaagaagtcctgttattgataaaatcaagatatgactaatagtgcagtcaaaaagaggcaacaaaaaagcacctataacttatcttgggttggttaatgaggaagctgtcattcaaaattagtaagactactgtaacatttcttggggtcctgaacattggaatgagagtcggttttcagagttgagcccacctctgtcattagctttgtgcaaacctcatcaggctcaagattcctcatttgtaaaggggaatgaattctctgaccagttagtttacattcctaagacaaggttaaatttggaaagcaaagaattttcggtatatatgtgataattttgaaattcttgaatttttaaaaaatttaaatgccacattacttatatttttttctaaaaaaaagtcaaaccaagcgctgtctagttattaatagataccacagatgagatgcctgagttggtaagctctttttaattctagttcttttcaactacaataattttatagacttttttttgaaggctagaatgttgatgtggaatcaaataggtatgcctctatgtatggtagatgcacctgacagggatcacttgacttgaacatgccctgacaatgatcctgtgtggcaggtgcacctgattctgagttctgagttaagaaatccgggagtgggccgggcggggtggccggtgcctgtaatcccagcactttgggaggccgaggcaggtggatcatttgaggtcggaagtccaagaccagcctggccaatgtggcaaaaccccgtctctactaaaaatacaaaaaccagctgggcgtggtggcgcaggcctgtagtcccagctactttggaggctgaggcaggagaattgcttgaacccgggaggtggaggttgcagtgagccaagatcacgccagtgcactccagcctgggcgacagaatgagactctgtttcaaacaacagcaacaacaaaacccaaaacaaaaaaacaacaacaaagaaatccaggagtggctaacccagagagccattccttatctgtaaggaacatctgagccctcatctccttctgtggaacatgggcctcgccggggattgagaccctttgttatgagttaagtggaagttgccaggtggagattgttagggggagggtgttaaatgagaatgctgtagagaccacatgccttttgcaagcggctgcggttcctctgtccaacccaccaccactggactctctaccctgtatgcaagcccccagtaaaaccctatgagacatacggttcactagctctgggcctcttctggctcttgaacctggtgccatccacattgcagtcagtaggagtttggcatgacaccttattatgtgaacttttatatcaagccattaaatttttttaaaatagactttatattttacaacagttttaaatttacaggaaaattgagaggatagtccagagagttcccataggctttgcatccagttttccctattgttaacatcttatattaatatggtacatttgttgcagtcagtaaaccaattttgatacatggttattaactaaagtctatactttattcagatgtccttagtttttgtctaatgtcctttctgtgttccaggatgccatccaggaaggcgcattatatttaattgtcaggtctccatagcctcctttcctcttggctatgacagtttctttatacttctctagttttttaataaccttaaaggttttgtattggtcagataatttgtaggattcccctctgtgggaattttctcatgctttgcctggggttattggttttaagaaggaagaccacagaggtaaaatgcccatttcatcacatcatatcaagggtacgtgtttatcaacatgatacagccctgttggcattgaccttgatcacctggctcaggtggtggttgttgagtttctccacttgaaaattactcttcttcccactttatgtgctctactctttggaaggaagtcagtttgcacagcccacaattaaggagcagagaattatgcttcattttcttgagggcagagtatctacataaattatttggaattcttctgcgcaggagatttgtctcttttttcctatttatgtattcattcattcagtcatttagactcatggatatttacattgtactttgatttctaatccagcactacttcataatttttattgctcaaattattccggctttagctattagaagccctttcacttggttcctatgctcatttgacatagcctcttttttttttttcttacaagatgctgcagtctcatcttgcatattttcagccctaatcctagaatcagctgttcctccaaggagcccttgttccttttattggagagtaatgttattggagaatagtattaaaatctggatgttaaggatgctcgttgccactggagtttctttgcttttaagacttctcagttgatagagcaaggcaatgtatttgtccatgttcacccttatgttatgcagatctataaatatttctatagctaactagttgtatttatattaagctataatatctagtctatattaagctaaatacaagttcatccggatgtttcctactctaacgtattaccacatggacactatatctctcctccttggttatgtataaattctcactccatccaccatctatgtacttaattgttcagtttcagtatatgtgcgtagccgtatcagaattgttaacccaggctgggtacagtggctcatgcctgtaatcccaatactttgggaggctgaggcaggtggattgcttgagcccaggaatttgagaccagcctgggcaacatggcataaccccatgtctactaaaaatacaaaaaaattgctggtcatggtagcatgtgcctgtagtcccagctacccgagaagctgaggtgggaggatcacctgagcccaggaagtcaaggctgcagtgagctgtgatcgtgccattgcactccagcctgggagacagagtaagactctttcttaaaaaaataaaaaataaaaaatataaaaaaatttgttaacccacacctatatggatctttttaaaagctgcaagactgctaacaaatatttatttatttatttatttatttatttatttgagacagagtctccctctgtcacccaggctggagtgcaatgacacaatctcagcccactgcaacctctgcttccccggctcaggcgattctcctgccccagcctcccgagtagctaagattacaggcacccgccaccatgcccagctaattttgtatttttagtagagacggggtttcaccatgttagccaggctggtctcgaactcctgacctcaggtgatccacttgcctcggcctcccaaattgctgggattataggtgtgagccaccatgcctggccataaatacttattttgttcccgtggttttttttttcttttctcttttttaaagtaaatcctttgcactatttttattattttaagaccagtgttattcagagcctgggttaaacactattctgtgtgtgtgtgtgtgtgtgtgtgtgtgtttgtttgtttgtttgttttttgagacagagtctcgctctgtcacccatgctggagtgcagtggtgtgatcttggctcactgcaacctccgcctccctggttcgggagattcttcggcctcagcctcccgagtagctgggactataggtgcgcgccaacatgctcagctaatttttgtatttttagtagagacggagtgtcaccatattggccaggctggtttcaaactcctgaccttgtgatccacctcggcctcccaaagtgctgggattacaggcatgagccaccactcccggccagcactattctgtcttatactcactctgccatctgtgtgtgtatatggtacgtatgtgaggctggatctgtgcacttggaaaagttggagagatgatttaggtaaaacttttagttttcacttcttttgcctttttgcttatcttgatccatttagttcctaccatctggcaaatagttctcatctgaagaatcccatctgtcagttctcactattatccggtaatagttacagtgaaatgctggtgacggcaacagccactttttaaaaggatgtgtaattcaccctcatgtcctctttgagaacccagtaactgcccacactctgaagctaaaaccataacagttttatcacatggaaagtttgttgagaaatgtttggctgtttctgtgaagtaatcgtcccgtctcttgagtacagatgcctcccaggaaaattttcccagcctatttgttaatgtgaaagttacaaaagatagcatataatgagcacattcaagacaaaaaaatttgtggagtaagagtctgaaatggtaaaataaaaaatcacttaagaaaacatttatctgtagctgtcattttcatatacacatatctagtgtatacaagttagtaagtacataattctcaaaagttctacctgtctacacatctacacagaaaaattaggaaagtcttgtccagacttttccatcatcttcagtataaagcatcttctagctgttggaatagaaacaagctagattcttgactcctttctatttgattatttagatctgaccttcagacgacatccagaatctgagaacacgcaccacctctactgctctcatcctggtccaagtcattgtcatctcccacctggattaatgccagagcccccttcctggtcttctcacttctagtcttgaccccctagggcaagaataattagcttagaaaaccaccccagagccttccagcattactctgagtactggccagagttggacaatgtttaaggccccgtgcagtcagctgtccctgtcctgtcctggctgtcactcactcgcttgcccactgatctcttccacatcattcctccacgacagcactgatctccttgttcttctgtgagttcaccaggcatgcatctgcctcaagactttgtgtaatacttgttgcttcctctggctagaatattcttccctttgattctgaatactttgttccctcacttcctcaagtcttcactgaaatgtcatattttcaagtaggcattccctgaccaccctatttaaaatttcacccctcagaaaaaacaaacaaaccacccctttctctgctttatctatgtaacatttattaccatccaacagacactgtatttttatctgtattttttatcgcttccccgctaggatcatatatcgttttatctgttttgttcactgctgtattcttagcactgagacataattgtaagtatgcagtgaagagttagtggataaaggacagtggctgcaagaggggatttaggaaacaccccctcccagccaggaccagcactcggtgcaagagttgaaagagttgatcactcagattctctgcttctccagtcgtagggactccaccccgctgtgttgattgctgtcatgtattcaccccatcataagcagtactcacatgtaaaacagtaccatgtcatctctgtggggctacaagtaggtggtgatggtgcaatgaacatataaaaccccagtgtcttcagtaggtgcgaaataggtgattagtgaatgatgaagagtagctgttgctgttttgattactatgattattattatgagaaactactgtggttgatgagatagatactggggagaaggatactattaatataatttattgagcaactttgttctgggcactagttgagtactttagggatattaattcatttaattctcccagttctgccatttactctctatgtgacctggactgttacatagtctctcagtctcaccctctctttttttttttttttttttttttttttttttttgagacggagtctcgctctttcgctcagtctggactgcagtggtgctatcttggctcactgcaacctccacctcccaggttcaagcgattctcctgcctcagcctactgagtagctgggattacaggcatgcaccaccacgcctggctaatttttttgtatttttagtagagacggggtttcaccatattagccagactggtctcgaactcctgaccttgtgatccacccgtctcggcctcccaaagtgctgggattacagacttgagccactgtgcccggcccttgccttctcttataaagtgaaatcattgtagctgctttggtgtggttctgaggacggtgagagaagacgcacgtgaagtattgagggtggtggcaggcacacagttcagagttactaacaatactggtgttttatcttcacaaggcagatctgggcccatagcacaaggaaaccgaggctttggcattttacagtaattacattgccagaacatttcccccactttcttgaatcatctttacctcttgagagatgaggaagagagggcacacctcgggcagaagtccaaagacctcaggcatttttggcctttcattcccatgattctggccaacatcattttagtccccagcagttcatagaaatattgtcttttaatctgatattcaaataatctgtgccttgaagaacctgtgtatggctctagaatcttttacattaatctactcaaccccactctgatgctcaaaacttcagcagtctgttttttttttattttaatgtctttattattatttttttttttgagacggagtctcgctctgtcgcccaggctggagtgcagtggcgcgatctcggctcactgcaagctccgcctcccgggttcacgccattctcctgcctcagcctcccgagtagctgggactacaggcgcccgctaccacgcccggctaattttttgtatttttagtagagacggggtttcaccgtgttagccaggatggtctcgatctcctgaccttgtgatccgcccgcctcggcctcccaaagtgctgggattacaggcgtgagccaccgcgcccggcctaatgtctttattttaaacatttatttttagaggtagggtctctctaagttatgcaggctggcctcaaattcctgggctcaagtgatcctcccaccacagcctcccaagtagctgggatgacacccccaggtgccgccatcctggcagcagagtcagttttgatacatctttcccttctcattcttcccaatgtcatggattgggaagttactgtggttttagttgcagtactttttactctgaattctgtttgcttcctggaattctgtctgtcttttgaaaagacaacataaagaaatcgaaaaatatactttaaattccatagtgtgggagcctctgctactcgcctgtttgatattcattcccattttttcctttctaaaagaattccagattttttttgttcagggtgacaatgtgctctgctgaaaatactttcacagattcccttgcaggtgcatgtgaccagatcacagtaatggcacatatggcctcagtggaatttgctgaggagtatgtccctcccaagtaacagcaaagctttattagaggaaaaaacaacaacagaaaacctttcacctttgtcttgtttctcctgccttctgtctggaacttggacacagagtcttgaatttctgtgaccataaaacacgaggataaaaccaacgtgctcaggatggcagtacagaaagataggaatacgctggtccctgatggcatcatggaatatctgcagtggccctagcttcagtgtcacttcttaggtgagatacataatcctaccgtgtgtttaagccacggtttgacatgtggtctattctctgccgctgactgcattcccagctgttctatatggcttgctagctaatttaagtctagttttattgtcaaattgaccacattgtagattataatattaaagtacttcacagtctaaaagtgaactacttttgtaaaagccaaaggaaatgggccaaatgaaccattttgaacagagtttaaatgagtgagttgagttaccactcttggatggagaactggagacctggattttcagtctagttcttctgccagttggctctgtgggcaagtcacttgacctgagctcttttcctcccatctgcaaaatgaggtaatttgagctagacagtcctcccaaagaccaccaaagagctagcagattgaggcctgcagactcctattgaatttgccatccttgttcaccttgccaagacttcatagccaagaagccagacccagattttgttcattagctttgaaaacaccctttcagttgggtgtgtgtgtgtgtgtgtgtgtgtgtggtgtgtgacatgcgttttgaatataaattgtgaattgttttagcaagaaaccaggttgtatgtttctcaataaacatgcatactgtatattgatgaatttatccacttgaaataaatggtgccaaattgcctaaagtttgctgtaaacaggaacatgatttctcattatgatgtttaatttgttttagtctttgatctcttacatcagaattctgttaagaactctttttacctgaaagatcaaagcaaataagcagaagcatttataaaaataaggtatacgtggctgtggagagaaactccaggtatatacgatcataggctttttaaaattaataaactttgtttttaaaaacaaagcagtggaagttcacagcaagtttgagtagaaagtacagtttccatgtaactgctgtcctagcaaagatttttaagtacaatattttttaattaaaaagagaaaatataaaccgtgctaagccagttggtgaaaaaggcttcattatacttttagcactcttaacgcttattaaaagtttttaaaaacagatttttgtggttgaatcgcttacaatttctgatgtgtaaccttctaacatgtttcatcaaattttaaaagtaatgtaagcagtgctgtccactgctaaattttattttaatgttagaatacaatgaggtttctattttgccattagtcctgagagcttattaagtaaccagttttaatcctttaaaaaaccattctcattttgagggacacatatttcttagctttgtgcaatataagaagctaagaccatcttggcagtatcaaatgaaatgttttgcaagttagaaagttcagtaaccacttataaacataatgaacaattgttatagtcagtctaatgcagaaatacaggtgttgggggcaggggggtggtgggtgggcagacttggtccacaagtagtagtttgccaacctctgtcctaaacacaagttcaagaatatggttctcttggatagattttctgccagatgaaagtaagagtaacatccttagctaatgaactcctaatatccaaggcaacttttaattaattcaggcttttaagaaaagcttgtttaccaactcctcattaaaaatgttcagactggctggtcgtggtggctcatgtctgtaatcccggcactttgggaggctgaggcaggcagattgcttgagcctaggagttcgagaccagcctgggcaacatatctagaccctgtctctgcaaaaagtgaaataattagctgggcatgatggtgcacagctgtagtcccagctactcaggaggctgaggtgggaggattgcatgacccccggaggtcgaagctgcagtgagccattgatccaaccactacattccagccagggtgacagagtgagaccttgtctgaaaacaaacaaacaaaaagattaatgcagtacatgtccttttggtgaataagtaaatatgttttggtaactttagctttgcattataatctagtcgtcagcagattgactaagggcagataaaacaagatgatttggttttgtggtttggcacttactgtctgatttatgcccccaagaactcttgcaggccaaggtcgagtgtatctgatacctgctctggctcttctcacgaactgatttagtagctttgggccagcattagattttttaaactctttgacctatttgtacatgacaggcatttaatctttccagtagttacttgtcaaatagaaaagcatcacttcttagtttggacatttgcaaatatgactgagcagagctgacagatgaggtgggcatcttcaggccatagggtacttctggcctcctgtaacctagaaaattgggatgcctcagatatcaggtattcttccaagcagctagggttagtccctgacctcagaaaccctgagagccctcagaaaccctgagaaatccacctgggaatggtgtatttgttttggatgagattacctttactttccattctccaggtcttcttgtgttttttgtttttgttttgttttgttttgttttatatcattctatgtaaaagagaaatgtggtatcatttgcattatcatgttatttctttccttataatttatatcttaatgcttatctctggggctaggttataatctcctgagttaggtagccttaggtttcttggcggagattcctcccctgggaagtgaggtttataaaagaacccgtgatgtggccctgtggagctgcatggggtgtgtgctcagtactcactggtttcttccctgcaaagtgacacctgcagcctttggggtaccatgtctcataatttttgcattccctgcaacacacactatactgctatgggcatcattgatcattttaaagatttaaggaatgacaagatacagtgcttattctcccctatgatttgcttagatttttatctaaatagtacttattgaaataagtacttcagtatcatgctacatcttacatgtttgagctagaaacagactaaagtttaaacccttttatgagaatgaaaagttacttccttccccttcttagggcttttaatccctctttatgttgcatttcagaaaatgccctatagcgtactatgaaagaaagacattcattcctgtctttgctgctgtgtggacgatctgtattccttgctccgtgggagttgtgggtttatgtctattcttgcatgttttgcctgaaggaccacagtgacctacttggtggtctccctgctttcatggtttcactatgctgatctatccttcacttaattatagagtctatcttaaaaaaaaaaaaaaaaaaaaaaaaacttttggcctatgttgcttcttccaaaatggcatccaaaacctaagcctctttaaaattggagtccagcatgcttccccagtgctacttccttctggactccctttgccacttgctttctgcttccacccatatccagatgggctgcaaatatgccttgctggttctttactctgtctttgcacaggaggctccctcattttgaagggtcttttgctacccatccatccatccatttggattctataatagagttcttgatgtttgacagaactaggccaggaattgtgggggtataatggcaagcaagacagagtctatccttacgttatggaagttcaattcatttcccatgtggcatactacttctcaccattcagattcatctcgaatattgtttcttctttgaggtttttcccactgcacccaagatactggcctgacactttccttatctctattacagaatttaacttgttcattcattaacagatatttattgcctactatgtgcaagaatctgtgctaaaagctgggaatattgcagtaaacaaaaattaagtttacagcttacatataatgtggtaattatccatcttttaccttcattagactgagttcatgtaggactttatgtaatatctttatatcttcaataccagaaatgcctagaaataatttgcataatatacattttctttaaagatttaacaaaagtctgagggacagttttcagaataaactgaattaaactctctctctcttatgtgtgttatgtaaacatatatataaaatacacttttgggttttttgcttaggaagtagaaaaatgctaaaatttctgttacttacaagcagattaaaatgtccaagaaagaaaagtagggatttatattgattctgctcaaatgcttacctagacaatgtcaatatttatattttactcccctgttgtagtagaatggtaattggttctctagttaagcagcttttttaggattaattttgaagcaagaaattcagattaattaagggacaatttcacttgcagcatttaggcattattttaaccatcaaacttgaagtggcaagaaacggagttgcttaaggaggccagacgtaacattctaaaggtagtagggtcttgattgggttgcttaggcattaaaaggctgtttaacttgtcttgaagtctatctttccttgatgtcttctgcggtaagaacactgtgatacagatggaatgacgggaagtggttttcctttctttcagttggtgagtttgtaagtgatgcccttctcgttcctgacaagtgcaaattcttacaccaggagaggatggatgtttgcgaaactcatcttcactggcacaccgtcgccaaagaggtaccagcccataaattctttcttattgcaaagtgaagatttcctggggacgtgcttaatggcattttaggggtattttgaggcaacagctatgttgataagttatttaagaaaaaaacccagtgctactatccgtaacccagattttagtttttagagtgattttaggttcacagcaaaatcgaacagaaaatagagttcccgtgtaccccctgtccccacacatgcgcagcctccccatccatgaatatttttaaaaagtcaaaaatagggccagttgaactagattcattatgtgcctgtgccgtgtttcgcaacttaaaaatataagttgtctgtgccatgccttataacttaaaaatataatctctaatagttataactttaaagtttacccttcagattatttttatgcacctgttgttttcttttgtcatatacaattttttaataatttagccttttcccctgttatctattagtgaatacagtggtagaacagtgaagtagcttttttataccagcctgaaagctccagttagaattcagtttctcagttataccatccagttttatattcagcaggccatgcctaccatcttgatttttccacagggtgagtctgaccgagcacttggttaacctctgcttttggctaagccaataaaagatgtaagatacttagcatgaaaaggtcactgtgtggtaagaccaccttcacagctgctgtgtccccttgataggtttcctaataaatttatataggtttatttgtggcaagatcagtcttaggctaactagaattaggctcctttatctagctcatagtgcttcacttgagtcaattttgatcccctgtccctcaccggaacatgtctggagacattttttgttattacagcttgagggagtggtgttactggcatctgatagtgcccagaggccagagattctgctaaacatcctacagtcaacaggataaccacccgccacccccaagaattaggcagtccaaaacatcaatagtgctggggttgagaaatctgatctagcttagcttaaccattgtatcatagctttatagctgttagacagaaaataccactgaagatttagtattattttatgcctcttataaaatagtatatttggatccactgtagaataaaatgttttttatgtaaaaatgtgttttggaggtttaagagcttgctgagtttaagaaaacaaaccaaataatttgaagtccagctacctatttgataacctcattttttattccttctgtgttttcaaaagaaaaatcctttgtctctaagaaacggaaatgactcccataaggtcaaaatacagtctgtaatattttcattgtctacctttatgtcttgaattattcatccttcatttatcactagtggatgctctcagaactttatgctaatctagatttgtgcaaatttagcaaatcccagaaaagcaaaaagacattcaaggagaaatctctaatgactgtaagttctgattcttagtggctgcaggggataatttcttctcttcccaggattgttactctgaaagtgaaccaagagagtcagaatttctaggataaggcaggtccatgtgagataaacttccatctgtaagggaggtaggagtgagctggggatctacctggaatgcgcacaatttctggatacacgaattaagccagaaggcattaattctctggtatctgttcaccagtggagactgctacatcttatttcccaattagtttccattccagttgttcgtataaacctctattatataacatcgtggtcttattaaataaataataaacaagaataaaaagagtaccaaagtgtaacccatgctaaaaaaaatcctgttgtaaattcactcaaaaagcaaataatcttttcctttgtgaaattggttcctaatatattgggtctgcatgttgattattttatgtggagttttcttacaatgaaacacatctactctaccactcactgttttctccttacactttgtagacatgcagtgagaagagtaccaacttgcatgactacggcatgttgctgccctgcggaattgacaagttccgaggggtagagtttgtgtgttgcccactggctgaagaaagtgacaatgtggattctgctgatgcggaggaggatgactcggatgtctggtggggcggagcagacacagactatgcagatgggaggtaaggtggcctttgtgttcagcctcagagatgctgaaacatcttgtatggagtatttgtatcctgtaaattaatctttctgtttatcactgaaaaggtctctgcccactcccatcagagtctgctgttatgcaaaaatctgaactatgaatttttatggcatcctgttgaattaataatatcagtcacccatcacagagttaattttaactatttaatattaaacttgggatcaaaatcccactgataactatcataggttactggtagttctaacagggagttgaaataataatggcgttctgttttggtcattaatttaaaaatatttttaaatgctctctgggattgtcagtcattagtttaaggtgaattttcgttaaaggtttggtttgagattttgggcgttctctgtgtggatgtgtaagggtttttttttggccttttatcatttcttttccttcatagtggaagtcaaaggcattaataaatgcttgttaattttttttaactacctttgatttgttgattgtaaagaaacctattttcgcctctttttcttagggagcttagtcccgttacttcttacctgattctcattcttaactgaaggcaaacatctatattcaaatcataaaattataaaatgagaatctttgggttggaaatgccatctggttcaggcattgattttatgctgtctcatcccccgaagggtgatgattgtatcacttatcttattccttcagtattctcttagatgttccctagagctacagatttccaaacagcacattcaataggagttgtaagtttataatcggcaaactacaggatgcttgtttttttttcttttaatttctggtgtaatctgctactagggcccccatagagtttattgtctatatcagctagaacactgggaccacagtcataaactgaaggatccaggcaaactgggtcatatggttacccccaccaattacagtcttcagtgatgatgtcactatccaggttgatattcagttgaaatgctagccagctccttcctagttaccttcatttacatcccatttcagtacctgaacacagtcatgctttagactctgaaattccttagaaatagtaccataaggtttatagctttgatattcctctctgatcatgatcttccctcataatcacctccccagttcaggcttttagtccattatcctctttttccctgcctgcctttctaatcaggatggaatcaatggataaccattcttacctattccattgaacatccttgacttggctgaaacccttcacattttctaaacatatttttgtcaattctccatagctaggaaaaattaatttctttctttagttgcttctgggatttctaaagtatcaagtcatgtaaccttaccacttaattccatttcttattcatgctgtaacatcagctgggatcttaatgttactagatgcacctaattatctctgtcttgatgacctatcatcttccccatagcagttgatccagcccaacttcattctccttggttcccagcgtaactctctctcatgctctacagatgacccctccaccgtcatccattgtgaatttctgcaacatggtacctgacatttggtaggtgcccagtacgtgtttgttgaataaaccattgaattttctcctgtacttcagcaactcttgtaccttcttctatccctttgtttcctgtcttcccttttatgattatgttctgctggactctcaatcatctcctctccctttcttgcattttcagtctccctctcccccacacccccaggcttcatccaccctcctcccagataattctttcccatgtgttactatctttctactatgtgtttttaatcctgttgacagttggtaggaaatatttgatggtttattctacctgtagaaaagtccaaattctcttgcagggcattcagaagtctcttacatggcttcagcctgcattttcagccttatacatgtatgtgactctcctggcatcctaaaaccattgaccttttctttctctaggctttcattcccaccgttctgccccatctgaaatatttttcctttttttgtcaaatggggttaatgtatgataaagatatttgtcaactctaaagtgccacttcttatgacccgtcaaaatctatatatttataaatgttcacctgaaaagatgcagcctttacaagtctttacaggtgccttgctctgctatactacccttgctttacctttttcttataagaccataacttatcttccaattaattgtagtcatatctctttttatctgttagaatccaaactatagtttatgtgtctggtatgtcttgcacataggtcctcaataaatattagacaaagtaaattgtatattttaaattttttttcatagcttttggtaaggacttcatggtccacgattggatattgtagaaagcttatccagcccactgcccaggacgactttgaatgcggaccaacacaaattcataaactttcttaaaacattatgaaatttttttgcctttttttttctataggccctgttatagagcctcccatcttttagcaaagaactgtctaatacaaatgtaatgtgagccacatactttttcgttttctttttttaagatggagtctcgctctgtcacccaggctggagtgcagtggcgtgatctcggctcactgcaacctccacctcccgggttcaagcgattctcctgcctcagcctcctaagtagctgggattacagacatgtgccagcatgcccagctaatttttttttttttgtacttttagtagaggtggggtttcaccatgttggccgggctgatctcgaactcctgacctcgtcatccaccaacctcagcctcccaaagtgctgggattacaggcttgagccaccgtgcctggccttactttttcattttctaatagacagtttaaaaatagtaaaaagaaacaggtgaatttaattttaacaacattttatttaatccagtatatctgaaatatcatgtgaccaatatgaaaaatttaataagatagttcacattctttttttatgtttctttctttcgtaagaagtcttaacacttcttttaacatttaacagcacgtctcaattcatactagccacacactgtgtttgatagttacatgtggctggtgactactatatttggacagtgtagttcctggatgacttgaaatttcttatcactctttatttttccattaagacagacggtttgtataacctagtaatgttttctaaggctgagccactgaatttttattattgtttttaactattcttgtttttaaaatttaaaaaaattggtttggattcagtataattagtatatcaggtcacttgcaccattttattttttaacttcttttcctgtagccctgcaggcgggcagggcttctttcatgtggacaaaaccagaaaggtgttgcatcactgatccacacacaaggtgggctcctgccaactggcagcctccttgttccaggaaccagccctccttttgacacttgaaatgtaaaatcagaatagaagtttaacgtacctgacttaaaacatcttcaggggatgctacgtgacaattcttgaagaaggagaaacgagctaccattttcctggaaacaatatttgattcacagtattttgttgtttggtagttaatgaggcttgttttgatagaagatgagtgtttttctatcgctaatggggcatttagagaaacattccttgtaggatgagctctgttttatgacctcattgaaaaagaggtatgaaaaagaggtaaatctttaacataggcaaaacaggtagtgtttcagaaatttatgtgtaaattaccgagtatatttttctccagtgttgtaatggtcatattctcagatcacctcaaaatacctatttatgcagtctgtaatgtagcataatccagactgttactaacattatgtagcataatgttaataataataattacgtacataatgttaataatacacagactccagccatcgtgggtaagatttttttccatgggaaaattcatttggaaagctaacttgtaagactagccaggtaggcagcctagccctggaggcagagctgctcctcacctggaactgcagaatctgattgaacccagtggtccatgggggttgctgaattcgtaaagcaaatgaaatgttagaagaccctctaattgttgtagagtcacacttttcctcttgcagaggaggtactcacattttttttaagaaacaatctttaattatcgatgtattcttttaggtttaggtttgcagacactggtgagcgtgtgctgagaggtaacttgatgtatctttctggataattagatgattttttttttctatttctttgaacattttttttttaaagagctgcttaagatctggaggagtgattccttttgaccgtgtcttattttcattaagactgtataacttggaagagtttttttttttctttttctttttcttttttttttaagatgaagtttttgctcttgttgcccaggctggagtacagtggtgtgatcttggctcactgcaacctctgcctcctgggttcaaacgattctcctgactcagcttcccgagtaattgggattacaggtgttcaccaccacacccagctaatttttgtatttttagtagagacagggtttcaccatgttggccaggttagttaatgttactctctggtttggggggcagtgatatgttttggcttttttcccacccagatctcttcttgaattcccatgtgttgtggaagggactcggtgggaggcaattgaatcatgggggcaagtctttcccatgctgttcctgtgaagtgaataagtctcacgagatctgatggttttaaaaagaggggttcccctgcacaagttctctctctttgcctgctgccatacatgtaagacatgacttgctcctccttgccttccaccgtgattgtgaggcttccccagccatgtggaactgtaagtccagttaaacctctttcttctgtaaattacccagtctcaggtatgcctttatcggcaacatgcaaatgaactaatacagctcggggtggcttgtgtgggtgcgtatggccatgtatgcaggtgtgcgtgcattggaatatacaattccgtattgaacccagtttaaacttcatcagttctggtgattgctggagtgtcacatatggcaagacgtcaccttgccctctaactacaccagaaaaccaggccagcaccattgactatctagatacagtgggccgtttatattattattgtttcatatttttagattatttggtaaacaatttacagaactaagaataaaggaatagtgagaaataactattagcaattttaataagagttaacatagtaaatattttaattttacgaagaatttaaatatggtaaacccacatgtttattctgtattttcccagttttgaaggtatggatttctgaaatgagcattatcctttggaatgcagctagctgctaatcacctgccatgcacgaacctgaaatatatccgtcttacaaatactggttctacatttcaaatacatctctattaggttcatcatatttcttggtcttttttttttatacttgcaatttcatttaattattgtaaaaatttaagatatttaaaacattgacagctcataattttattgaagagagaatatagccatcttccctcaggaataaaatgttttcaagtttggatttgtaaacagctattaaaatgatcaagccagtctttttttccccctttttttctgcattatctcttctaatcaccttagagagattcctgccttgggcatttgtccacttcctaatggtatcaaataaatgtgttgcacagacataaaatgtgttgcataagcatcataaaatggcaaggaatactgtcacatcattttagcaatgatggttaatgtttttgtcacataatattgagtgatgatatccttcctgttgaatgactaagtggatgagaataccatatttcctttttattcttagaaatacattgctcagccgggcgcagtagctcacgcctgtaatcccagcactttgggaggccgaggtgggccgatcgcctgaggttgggagttcgagaccagcctgaccaacatggagaaagcccatccctactaaaaatacaaaattagctaggcgtggtggcgcatgcctgtaatcccagctactcgggaggctgaggcaggagaatcaattgaaccagggaggcagaggttgcagtgagccaagattgcaccatcacactccagcctgggcaataagagcgaaactccacctcaaaaaagaaagaaagaaagaaagaaatacattgctcacttgtcaattcttgagcttgagaaaattcatctaggatatcatgtgaaggctcatagcctaaggttttacttacgtgatcaatttcattcttcttctggtttatctaattggtaaaatgcctccttctgtcagttgttcctatttgccaatatgtggaagatgatttttgactatattcagtgagtctccagacttctttttatcatgctttttaaagagatgggacctcactctgttgcccagacttgagcgcagtggctattcactggtgtgagtatggtgcattacagctgcaaactcctgggctcaagtgatcctcatgcctcaacatcccaagtagctgggactatgcagactttttttaaaccatcttgaaagatgatgcagtactttgggaacacagcaataaaaatgtgataatttccctattgcatcacctttctaggcaattatatcattctttcatgctcatattattttgtcttctttagcacagtttttaaatagttgatggctaatgatgaaataattcttcggatgataaatattttgtaacataggaacacaatataggaaaaagatcgaggttcataccatatctcagactcatggttaagtacaagctagaatgagttttagtcgattaaatttctttttctctatgaatggataaagtgagaatatcagcccacaagtagttagaagtgctcagaactcaaaggtaaaattgtgtccaagacctgatggtattctaaaggttaacagcctatcctacttaccaagaatttacatttattatgaggcctgtacaacctgatgcaggaaaatacttggcataattttctataagttaggtagttaggtgctcaacaagtatttgagttgaatcacattggcattcacatcaaacacatacacctacgtcatcatgttaacttaaggttaatagtgtcaccaaaactaactggtctttaaaaaagaaaaactaggccaggcatggtggctcatgcctgtaatcccagcactttgggaggccgaggctggcagatctcttgatgtcaggagttcaagaccagcctggccaacatggaaaaaccccctctctactaaaaatacaaaatagccaggcatggtggcatgtgcctgtaatcccagctactggggagactgccagagaatcgcttgaacccaggaggtggaggttgcagtgagctgagatcgcaccactgcacttcagcctgggcaacagagcaagactctgtctcaaaaaaaaaagaaaagaaaagaaaagaaaaactaaggaatatcattctagacatgcagtaattaagtaaaattgcatcaggagtctaataacatagcatgatgggtcccatgtttcattatttccatgggcagaagagggatggctacattataaataaaggaaaattgtaagaataagaaaagatgaagtatgaaatatttccaactcaaaaacaaactgtatctgagcatgcagaggtacaaaatgtcacctttttcctccagtgtaatgaagggcactaaacctcttgagcatttgatatgttccagatactatattaaagtgatttttttttttaggagacaggttcttgctgtcacacatgctggagtgcagtattgcaaccatagatcagtgtaaccttgaactcctgggctcaagtgatcctcctgcctcagcctcccaaatggctaagactacaaacacattgccaccatgcctgcctaatttattttgatttatttattttttttgtagagacaggggtctcactatgttgcccagactgttttcaaactcctggcctcaagtgatcctcctgcctgggcctcccaaagtgttgagattacaggcatgagccaccacgccagaccaaggggtgaaatcttgataacaataatcaatgcagtcatcataaaacgcttgcacaggctcaatttgtaggtggcacagtgctacatctagtcaaaagcaaatttaattatggtcattgtgctctgagaacttttctcagaaaataataaccagatggtattatagatggtgcatttcacaaatacatgatttgtagttagtgaaaacttgtcattcaatcatgtaataaattatgcacatgccgtcttccacttagctagtgatgttgaaacattcatagccttacctgatgagctcaggctgtcatgagaatttatgtctattcagtactttgtctttaaaattaggtgagagagaaagagaggctgtatttgactatatatctttttatttgtatctctggagttacaagtttttgaatatataatctttcagctgcctttctgcattgcattttgagaaatgatattaaatgctcaaggaaaaaaaacctaacaactttagagggccgcaaagtgaatcatacaaaagataaattaaagctttaaatctttgccagtggatgagtcaagtaagagtggatttaatgaaatggctcatggctttgagaagcagctgtcataatgctgggttggcagcttccaggactgtgtgaggctttctgactgtctatactgaaataggagaactcatttgaaaatgacgaataggagaatagcagaaacttgcattttcttttgagggaactggctgccagttttgaggtccttatttagaaatgctcgattcctgtattgaataaacttggactacatgtatgtcaaaaagaaaagcaaaacacttttatagccttaagcagattacagatgtgtggccaaaccagtggggtctgtttttgtttccaagcaggtgatggctggaagaggagatgcctctgtagtgcagggcttgagttgctgctgtctgagctacatctggcaatgagactgtgctgcttactgagacctaatggcacaggttgccccagtaacaggatattgctgaatgagaaatactgtaggattcatttgtaagagttatttggagggttggattattcagtgctaaggatcctaagctactgatgcatggactcttttcttccctccagtatcttttaattaaactgtacaaattccctggcttaaaaatagtaggaaaagaggaagaaaatacagattcttatgattttaactggtctctggcaatagtacaccgaaacattaatttcttgttgaaaccatctggatatttgtatcttcagtgtaaaacccctaatttagataggactctccattgtgacatggaaaaataaccctttaattagttaattaattttactgtggcctcaaaatctacatattagcatatcaagccaaaaactgttggctttacttgggagccatgtggcttaaactagtaccagtaacttaccacaaggaactcagcaaaattataagtccatgtttgttttggaaggaaggcaattattacgaaaataatttagagatgttcaaactatttcctttgagtagaggtagagagtgaacaaaatctgtcccaagtgggagctaactagcttccttttttgccctccctgtttacaaagtaacacttttagtttactaggtaacatttgcagtatccccagtgtttcaatgtaaaattgtaggtggtagactaatgccacttagccaaagccatgatcacctgaatttttaatatatatttttgtatggagtgagatactgggagaacagtcttcattagcttaaactctagaatgtactgtttgtttgtttgtttgtttgtttgttttgagatagagtctcgctctgtcacccaggctgcagtgcaatggtgcaatctcagctcactgcaacctcccctcccaagttcaagtggtactcctgcctcagtctcccgaggattacaggtgcctgcttccacactcagctttttttttttttttttaatggagacggagtctcactctgttgcccaggctggagtgcagtggtgtgatttgggctcactgcaacctctgcctcccaggttcaagcgattctcctgccttagcctcccgagtcgctgggattacaggtgccaaccaccatgcctggctaatttttgtatttttagtagagacgaggtttcaccatgttggtcaggctggtctcgaattcctgacctcaagtgatccactggcctcggcctcccaaagtgctgggattacaggcataagctaccatgcccagccaagaatgtacaatatttttaaagaaatgcggtttattaccataaaatacaggttgagcatccctaatccaaaatctgaaatgccctaaaatccaaaatgttttgagcactgacatgacagcaaacgtagaaaattatgtgactttatgtgttcaatgtatacaaacttcctttctgaaacaaaaattatttaaaatgttgtataaaattgccttcaggctgtgtgtataaggtatttttgaaacataaatgaattttatgtttatacttgggtcccatctccaacatatcttatatgtatggaaatatcccaaaatttgaaaaaaatctgaaatctgaaacacttctggtcccaggcagtttggataaggattactcaatctgtaaatacagtagctcaaattgattttgtaaggcagtcaagttattatttatagtattttaatttgtattattcttttaatatagcaattcattttatatatttatataaataaattttttgcaattgagcaaattaaaaaaattaagtgcttccttcagatctacattttattttctatttgttatcaatttaataagtaaaggacacacagatcatctgattgtgttgtcagacatttgaaggtgcaactgatgaatgttcactgttgtactttgttttgtcatgtaaattgttttaaagagaagtgaatgttgagcatatagtaggccacacgtgcctgtggattggctcattgttttaggaatgtgtaattctggaaaagatttgccaagggtattcaaaagtatagtttgatattagaaattatttgaaaataatctttatagcatagcaccattttatttagatcaatagtaattcaagcagtatacataatttgctattgtaagcgtagcatataacctaagttttcttttacatttgagaccactgtttgctgttggtcgaatttggtcttccaagattttttgcttagtgacctaattgccagcctttgtgaagagctgttacttattgtcaaaccaggcagtaagggtttgcttttatctttttatcagttctttcaatgctagtagtcatgagattaatgtagttggatactaaaatgttaatacgtgttagataacaaactgggaaagagatgaatgacatcatgaaggaaagggcagtattgcacttacagtgatttcatgatgatagaactaacctgcctaaaaagacattgggtggaaacagaaaccaggtgtaatagacgcatccaagtagtcaaggaaagaaaagacttgtaagtaaataagataatctttgcttcaaaaatatcttcaaaggtttaaaatgtgctttaccctcatatataatctttttgagcctatttctttacctcaaacatggggaaaattgcaataatctgtatcacggtatttgcttccaaaacgactaattggtgtaaatgcatatcaagccggtaaagtttacagtggacttgtttaaaatgcgtagattggaattgttgggggagcaggccagcagcatgggatgttttttttgtttgtttgtttgtttaagactctgtcgcccagactggagtgcagtggcacaatctcggctcactgcaacctccgtctcctgagttcaagcaattctcctacctcagcctcccaagtagctgggattacgggtgcctgccaccacgcccagctagtttttacatttttagtagagacagggtatcaccacgttggccagactggtctcgaactcctgacctcaggtgatccgcctgcctcgggctcccaaagtgctgggattacaggcgtgagacaccgcgccagctggggtgatttttttcttagtcaaatcacttctctacccatcatctcacactgtcgaatacaaagactctccttggggctcaatgactcatctcccacctctggtttgataatcatggctattataacatgttccctttttaattagttattttaaaattattgtaggtcttgtaatcataatcaataataatacgtaatggctccttaagcacttctatcctagataaggttgagaacattattaaaattagttttggtagtaatcaagtaatgataattcttatttatgaatttaaatatgtaggagtttttttattttagggaagcaaaaaggactagaaagtatgatgtctcatgattagaaaactgctataaaaatgaaggtagaattgatttgggctgttttggacattttaaatagaaatttaaataggtattcaaatagcaaagtcattctactttaaaacttctatacttttttaggatcttcaattttatatttaaattatatttttgaaatggttttagaagaaatattgtatcttaaactctaactactaataagtaagagaagatatatcaaaggtttgatcttttatctcctagaatatactattcattcgtttcccattgtacgtcatttgaatgttaatggttagcctcaaatggttttcaacataattgtatagctactattattggaaaattggagccaaggactcatacacatatcagaagtggtaatgaagcactttggttttatgaaaatatgtttacaaggtagtcacaggatagcaatattgcatttactgtaatacaatgatggtggaactaagtgcagtggaacaggatgctgagaccacagttaccgcatctctaagtgcctcgtctagttatggtccaacctcagatataactcattggtgttgaaacacacctagcaacattttaagcatagaccgttcattaaaaggtacctttttaaaaatttttatttttaaaaattgacatgtaataattgtacacatttacagggtacacagtgatcagatcagactgatcagcatattcatctcaggcatgtatcatttctttgtgttgggaaaattcaatatcctgcttctagctgtttgagattatgtcatatattactgttaactgtagtcatcctacagtgctgtagagcactagaacttattcctcttatctagctgtaatttggtatcctttaacaaatctttctctatcctcagtttctacctacccttcccagcctccatcatcctctgttctactctttacgtctatgaaatcaacattttctagcttctgcatatgagagcatgtggtgtttaactttctgtttttggcttatttcacttaacatatgtcctccagttccatccatgttgcttcaaatgacaggattttattcttttgtatggcttaatagtatttcattatacgtgcatgcacgcacggacacacacacatacacacacacacacacatcacattttcttcatccattagtctctttggacatctaggttattccatatcttggctattgtgagtagtgctgcagtaaatatgggagtgcagatacctcttttaatatactgatttctcttcctttagataaatgcccagtagtgggattgctggatcgtatggtagctctatttttagttttttgaggaatctccatactatcctcaaatggttgtactagaacagagcttttttaccttccttccatttgggaatcttcttacccaacatgtatattagtaacttggctatgtatgttccattctctgtctcaaatactgtgtctaggacatctgcaatctttggctatgaccacgactgtaaagtgcatgacgcttttgctctgtcatcagtattagttgacaggcaagtaagatagtacttctcttcataacccctttacctgcccagcagaataccagtacagacagacccagaatatctctgggctcaagaatccagacatttataggatgggacttttatctataaatcaccttaagattagtaagttcttagaattggttacctttgccatttctcagaagccctttgtctagtaacctgtgtgtcactgtcatttccagcctgtctttcctacacattgtttatgcaggctttaggagtgcccaccccccagttctaccccccacccccaccctagcctttgtggttttaattatcctgtcttggctgattttgttttgttttgacatttcatccattaaattcctgacactggctatctctttacaattattatactatttttctttctggctcgctcttcctgattgctgtaatccatgcccttgactttaaataccatttgtaagtagactaggccaaggtttatttctctaggccagactctacctagttatttcataggcatatgaatcctaacatgtccaaatgagagttcttaattcccctgctacccagtcctcaatgtggttctctcaaagctattctatctcagtaatggtcctatgccctctcctagggattattgctgagaacctagaactcatcatcgtctcttctgcacatcctatgaattctggatttatccacttatctccatcttttccagcactaatctaaactcccattgtttcttgctggagttatttccgtatcctgctaatctctgctctcgttctctctccctgacacatgcgctgctttcttctcccacaccaagccattctctgtacagcagccaggatgtagagtgtttatttacataaagcagatcctggaacccccaaatttaagttgtgttcgtggcttaccaatacgcttaaaaaccaagtgcacagagagaaaacaatgaagccttatttggatatgctgaggataattgataacgggtaacaactaacaaacacgtagttggtgtcaggtttgacctcctacattccttacaggtattagtgtatttgacccagctcctccctacctccgcagtatcaccccatgcctctctttcccccgactctcccctgctcagtgtcacacaagtcaatatccccagcttgctaacccccgggctgacagatctcattgtctataatggatgttccaaggtcccaccttcagcctcagttttgttgccatctttccagaatgaattcccttgatcattctgttttttggagacaaggtcctgctctgtcacctaggctggagtgcagtggcatgatcatggctcactgtagccttgacctccctggctctggagatcctcctgagtagctgggactacaggctgcacctggctaatttttttttaatttttagtggagacaagatctcactttgttgcccaggcttgtctcaaactcctgaactcaagcagtcctcccacctccgtctcccagagtgctagaattacaggcatgagccaccatgcctggccctgatcattcttttctgaagaaaacaccccttcttcattattctcaatcctagcagcctatttacttccattctgaaatgaatcacattttagtattttattggttcgttgtcgttctctccccccatagaatgtaatctctctgagtacagggagcttatctttttcccttttggagcctcggatccagcagaatgccagacacttagcagccactagcatttgatgagtgaatggcttttcatacacaattttagacattgttcctgattggtctctctagtcaataatagatttatcaaatctaatcgataatagatttctttttcttttctttttttctttttctttttctttttttttttgagaagtcttgctctgtcgcccaggctggagtgcagtggcatgatcttggctcactgcaggctctgcctcccaggttcacgccattctcctgcctcagcctcccaagtaactgggactataggcgcccgccaccatgcccagctattttttgtgttttagtagagatggggtttcactgtgttagccaggatggtctcgatctcctgtcctcaagatccgcccgcctcagcctcccagagtgctgggattacaggcctgagccaccgtgcctggccgatagtagatttcttttattgattagagagactaatcagcaacaatgttttaaaattctcacatagatctctgaatgggaaagcagtcttgaattatgcttgcagggagagagaggggaaggaaggaggaggaatggtataattagacttcataaggctagattttgtttctacttaaataatggtatcacagtgggacatattatccatgcagaaagtgagtgggcatctggtctattatctgtggtctttcaggaatggcagctctttagtttaaaaaacaacaaagtgcagcactgtttatttaatggaaatagaaaagcagtgcctgtgtattagtggctcagatttttttgttctttgttttcagctgtctgctgtatgcctctccagcggggtcttacagaatctcaagtctaccatgatcaaagctgaacccattagctccatttcttaattcctcctgtatcctctgttaccattagtaactattctccaactcaaagcatcagattcctcctcttactcactcccttcatccccagtcaccagttctgtgctgttattttatccaagttctcagtaggcttcacgagcaccgccttcacatcccaactgtcgctcctccacctatctgtcctccatgcttctgctagctcatgtttgttgcaatacaactaaccttgccactcttctgcttcaggcttttctactaggctctgcatctagatgatggtccagactcctcagcctgtgaaacaaagcccttcataaaagagcagagctacagctagtcagctcccttcctgcagtccaccccctcctccaccatactgagaattggcaattcctgtagcactctttgtatgagtccattttcacactgctataaagatataaccaagactgggtagtttataaaggaaagaggtttaattgactcacagttctgcatggctgaggaggcctcaggaaacttacaatcatggcagaaggggaagcaaacacatccttcttcataaggcggcaggaaagagaagagcgaggagcagagtgggaacagccccttataaaactgtcagatctcctgagaactccctcactgtcacgagaacagcatggggaaaccactcccatgatccaattccgtcccaccaggtctttctctagacacatggggattatgaggattacaattcaagatgagatttgagtgaggacacagccaaaccatatcactcttcatctgctacgggtgccattccctgtttctacagtgtcctgtttgctaccttctttgtagatttctattcattcatcatgtcccagtttacctgttacctcttcaacagattattcttcagtctgtccctcccaaactccaccaatgaacattctttgttcagcccattattgttaatatgcacttcactgaaaacactgttttatgcttgtttacatcccatctctgcagggctctgagcctatagtcagcagttgggaacttactaggcatagcgcccagtaaaggatagctctttatatatatatatatattttttttttttctaaaataataagccccaagaaaaacattacctgtgaaaaacaaatgatatttttataccattttcaaaacctaatagcaataaaaagaaaagaaatgtcataagtatacatttaagctgtagttaaaaacagtaaataggcacagtatttaactcttatcatgtgctgttccaagtgtgttatttacatcattggctgttcacaccatcccctgaggtggttaatatttccatcccatgttaaagatgaggaaaccaagtcacagcagcctaagtgacatgttcatagtcacattggagctggcaggtggcagcactgagaatgaaacccacgtggctgagctctggaaagtcaccattaatcaccacactagaccttctctctaggatctacataactagaacatacaattaactggagtatatgtaagtgtagtcgttccttgagaaaggaaaagaattcacaaatttcatagcctcatcccttgtgcatttgtggcattgtgctaggggtgtctatttgatatttgaccctacagatttctcagatgccaaccaaccacagatactttaaaaaaagatacttaatacttaccaatgcaagaaagtgggcttgttggaagaggaaaaatgttagctcactaatggaaaatcaactaaaagtcttacctctccagaacatgcttttcctaaatgttgtggctaacccaagaagctacatcatctttacctttatgatacaatttaaagtacttttctacttacttcaagccctcagagcacagaggcaagggaggccttgggctataaaccctgtagcctgagccacatggcttcttctcctggacagatacctggcatattctgccactgaggatcagtggtgcagatgtatctgttttctcctaggaatggggctccacttacgaatctggggcaggacaaggtattgctgcattttggggagcgtgctggaaggaggagcagagtttgttgtttttgcttcctgatatggactggctgtgtctccattcaaatatcaacttcaattatatctcccagaattcccacatgttgtggagggacccaggggaggtaattgattcatgggggctgatcttctctgtactattcttgcgataatgaataagtctcacaagatctcatgggtttatcaggggtttctgcttttgcttcttcctcatttttctcttgccttttcctcatttttctcttgccgccaccatgtaagaaatgcctttcacctcccgccatgattctgaggcctccccagccatgtggaactgtaagtcccattaaacctctttttctccccaatcttgggtatgtctttatcagcagcatgaaaacagactgatacacttccttaacagaaccaattattttttcccaaaaaagagggggagaagcccagaagcatgcagcttctctcttctttctaaggaataggtcttcacaaagtgcccccaaaagaaaaggaccaggcttttctcttactttgtgactttcctaggttgctttgtagccattttggacacagaccacctatagctgtgtagtagttctcatgtgtatggacacagtggaaggagatgccaggcacatagttcttgctgcattgacaccttttcagggcatcttcttttaccatcttctgtagaaactgcaacagcccggccaactaccagccccagcccacccctagctttgctgctttcattttctctgtaacacttgtcaccttgtaatgtgctagtgtaacatcgttgttttagttttcttatatctttccttccctgtagaatgtaaataccaggaaggcagggaattttgtctgctttattctctgcagcatccctagactccagagcagaccctggaactcaaatatttgttagacagccaaaggtcatatacttccaactctccacccaaaatatatatggatcacccatccttagtagcagctaaacctttggacatgaggaatttgctcgttcacagttttctggcctagcatctgattaaccaaactttttcacatatcaagaatttaaaatgactccaaaactttttatgaccttaggtgcttctccttaattctagttggttcataaagctgtcagaacaataatctgcttttgataatatatgacttttcttgcctccaagatagcctttaaaaaagcaatttagccttttactgtaattatattccaaatttaagtcttgccagaatatcattttccccctttaaacatactttttatgatgccaagatattttaaagaaaagttcagataggaagcatatttaagatgtcagtatatgtctctaaaatctaagaacatttttctacagagtccagatgataccatctcacccacaaaattaacataaatttttagtaccattggataccatgtccatattcagattctccctgagttccagaaaggtccttcacaggttatgcatttcacatcctatccggcaccagggccagcatcttacatccttaattcttaggattcagaatagcactttttatatcctgacactgacttgctgaagaagctgtaccagttttcctataaactgtccactccttggatttgtcttatatcatgtcccaggggtattgtttagattgttgctctattgctaggatattcatgttaccctaagtgtgtactgagatagcagagtaaagagagattgtcttttaaaggttctgcccaggaactgctggtttacacaaaagctgggctttagtgcttctcggatctctttgcttgtttcagtaatttttttttagaaattcactaattcactaacgtaagtggggcagggtttacaggagcatgtgttgagagaagttggtttgactttaaatggtcatttttacaatccgtatttaggccttacaggtcgcatacaatctctgtcacatattgctgtcatttttaccccctttcttttctttttataatcctttaaaaaatgcaaagcccacccttagctcacaggatgtacaagaacaagttgcgggttgcagtttgccaagacctgctctgtgccactgctgacttgccattcttggagcccactttctgttcttgtcagccaattccctttcaggtgctcaggtttccctccctcctgtcaccgggcctttgcacatgctctacccaccctgcctagtggagagctatctttggcccctggacttcattcacttcggaccttctttgggtcacatttcagtcatgcctcactagacacctggaatctctgcctcactagacacactagcactcactcttttgggtcttctggctgtatgtaattgttatcagggcagtaattttgcatttatacaggtgctgaggtcagtgtctggcctttggctacttgccttgtgagccacctttgctttccagtgtacccctagctcctggcccagtgtccagcttcccagcatccattcatgttttccctggagaccattctgtgcccagcagccagagacatcattgcaacttaaatctcattgagtcgttccagttgctgtaagaaatgtaaccgtactgggtaacactatgcctgtctgtctccaccaccagatcttatacttcctccctcatctgctactccctaagctcactggccctttgttgtttttgctgaacgtgctaatctcttcctcacacctgggcctttgcacttgctcttacccctgcctcagccatccatgcactctcttggttttgccgtgcccgacttcagcatttttagttcacatggctcttccgtggggcccttccctgaccaccctgtttgaaatgctacccatccctggcacacatctatcatagtcattcattagcaattagccccatctcctttccctatagtacttttccataattttttttcttgctcatattacacctccccaactaatagatagattccaagaaattgagtgctttatcttcactacctggaatagtactggcacttggtaaagcacagcgaatattgttgattgaattactaggggttggcttagagaggtacttaatggaatgattcaatggatgaatgaatgaatgcattgccacttttttgctcattatcatcaatttgtacatatgcctttcaactcaaatatttatccattggctaaagaaaaaaaatacctgaatccccgtgtctctgcagtttacccttcctcactgttaaaactcagtgcctgtgtaaaatttcattatattttatttacttcttattccacttgtgcattatgtggatattcctgcctcatccccacagccacctatcacttccggccaactcagatgcctctggctcgcaacaatcacttctctgttgaatttctgaagcgtttaatctgcagtatgtctgttactcatacagcagttagtgtgaattgtctcactcagaataagtattcattaaatgtgtaagaatgatgatatagcctaatttcagatcaagattgtgatttatagctcattcttaatcagctgtgtcatgactttatttatttattccttttttttttttttttgagacagagtctcactctgtcacccaggctggagtgcaatgcagcttctgcctcctgagttcaagtgattctcatgcctcagcctcccaagtagctgggattacaggcgtgcacccccacgtccagctaattttttgtatttttagtagagacggaatttcactatgttggccaggctggtctcgaactcctggccccaagtgatctgcctgcctcggccccgcaacgtgctgggattacaggcatgagccacctcctcaggcctgagtcatgaatttttggtagtccagtcatgtggttatcttcctaaagctggaggccttaaacctagggccccaggtgggcttatgcctttagctgcaagtaacaagaaacccttttcaacctttttactgatttatttagagagaagtacacataagaggtaatgcaagtaagcaaagttttttaagaccacacaactagatagccagcatccggaccagaacacagagacttgctggcccctagaatcctctctcctggcccctgccagttactggcctttcccctgagttctatttgcctgcagtttgcttgttttcatatttaattcaaatagaattaggtgatgtgtccccttgtgtttcgcttctaacagtgcctttatgcgggagaagtactggctatttcttactttgccctccctccccggaaacattttcctaatttagtagcagtaatttcaaaaactgctttcctttcggacaaactgacttatccagccattgtaccttccagtttagactctggcagtttggagagttgagacagagagaaggagaaccgtctgtttatcttcttgaaaaaaactactgtattttctctctcttctgactctgggagcctctagactcttttttcccattttcatatccacagaggaagagtctgaacctcttcctgctgagctttcccctggttggttgcatttcaggaactgacattggttgtcttccctcttccctcatcagtgcaagtaggttggatctcatgatagtccatattcacataaccatgagaatcagagctttctctctgtcatttcctccctgtttatctgtagcaagaagaaaaaagtccgtcttaacagagactgtgaaagaataaatatagactttattgttttagagcagttttaggttcacagcaaaattaggcagaaggtactgagattctcccatatactccctgttcatacacttgcacagcctctcccattatcagcgtcccccttagagcgatttgttacaatcagtgaacctacactgacaccattattatcacccaaagtccatagtttacattagcattctctcagcattgtttattctgtgagtttggaaaactgtctaatgacatgtacccaccattgtagtgtcatactgagtacttttactatcccccaaatcctctgtgttcctcctgttcgaccctctcttgcctttaacctttccaagccactgatctgttactgtctataattttgccatttctagaatgtcatatggctttcttagaaaatacaaatggtgacttttttggcatgactttaataaacagaaatgaaaattggtgtgtgaatcaaaatctttcactctgtaaagggacttatcaggcggcacctgcatgtggaattatatcaaggtcagctttagttagaaacagaaggagagtcacctttgtgatgtcatttctccttcatccaagtaaaatctcgcatgctgacacataaaattttatcatcagtgatttatttcctcgtaggaatgtccctttgaccttattaaattcagatactctggggatggtcagcattttcagatggttcccttgttctgtaaaaatgtttgttattggtgtttaaaagctgtaaaagccacccactataaattgatagccactaaagtctgcgaatgtggtatgaatgttccactatgttgccaagcgtttattttattgtgagttgttatttgattgtttgtaaggaaattgttttatgatgctcagctttatatttccataaactgttcctcccttgcaactccttaaactgtgatgagcttttcaaaacaagtccacaggacaacagtctgtccagcatttgaagaagtggtggaaaagtcatttttttcctttcagtgtttctagctgttcatgaaaactgcagttaaaagttgtaatgttgttgtgtttggcattctttgggaagatgcagcattattcaaacaaaaccgtgtgctcttgttttaaatagtgtccaaatgaataattgaattcatggacatctaaatttaattccagaaatcaaagctatggtaataagaacttggacctgagttctcttaggccaagtaatttaattccttagccggttgaactatttattacgtgtctccgttcctggttattatgccagtaaattgctcaggcagatgcagggatggatgatgggcatataattcactctttttcacggctagacacataccagaatgcagatcacactaaacagctgtttttacaaacatggtttctattcagagctttaagggccacatccaagtaataacaaagaagcctggagaaggaacctggggatacccagggtcatgttttcaccatcccacctggaaacacggtgctgtccaaaccctggatggtacacttggacatcgtcattccagtcatggttcaagatcacgtgtatacatcatgatttaaagagaatactggtttgatttttcttcctgactttccctgaattttccacttaaattggaaaacagcgctagttagtgcccatgatttgattgaataagtaagagatctcaaacacggtaaattaactgatgacatgcatcaggtcatctttctttgattcaccagtaatacaacagtgagatcctacagaaaaatgcaaaggcagaagctcagggcagctgagcaactgttaaggattcttttgaaatgtagccccacgtagtaaactttcgtgcaataatttgggcagtcaaaaaaaaaagtcagttatttcacctcatttatttctacgaggagataaaggcttccaacatctgattttcagtgccagtgttttctgtttctcttttcacctatttcgtcctagtcttgtggaaatgttacaataactgattaggattttctctgtattaacacttcatttattaacatatgagtaagttgctattaataaattattctgcttaatcagtttctttttattctttagccacatgctaaacttcttcggatgtcttcacttaatatccttacatcatatttaatcagagttagaaaggcgttccacttgggggtcatacacatttttttgaaacttttataaacgccctttatactattcttgtatcctacgtaatcagagtcaggtgttccatggggatcatacacatctttatacaacttgtgtaacacatgctttaaatcctgaggtaatcagagaattcctgccattgatggattaatctctttacatatctttccctttcactctcagcaaaactacttatggcggtcctgttagactttgaaagcctttcaggtttatggaggagtcttcctttctattgtcgtagatcatggaatcatagtgttcgcttgtctcacgtgtttggaatctgatttcctacataatgctgtgctctcactacgagtccaaggcttcctgtggctacaaatcccgggttcctatcacttttcccaatgatgagcttctccttgttggccagaatcagctctgtggtaataattcccttctgctttctccctctcgcttttttttttccttctgggtacattataatgtcagcatagcagcttttaattctattactatggtacttctcgaatagacctgtggtagttgccccagaaaggttgaaaccccctgccacatctaggtctttctcctgtattggttttgtgatctgatcaaggacatctattcctctagtcctgctaggtggtatacgataggcttttactattagatattcaaatgctgtcaaccatgcctgccttgacaggtacatgatttccacaaggatttcctaataggcctttttaattttgttctagacatgcccttcttttgccatccaaatttgcttattttttacaaactatgatgcatcagcatgtaaatgtttaataccataaatatttctgatcctcttcccaatttcactgagttactggttatctcttgccattattctcagcatattgcagtggatctcagaatattttcccctgaccaccagcatcagtattacctgggaatttgaaatgcacattctcaggccccaccaaggcctcatgattcagaaactctggagctgcattagaaactgccacaggcacctggtgatctgtgttggtttttgtttgtttttaaggagacagtgtctttgtctccctggctggaatgcagtgatgcagtcatagctcacagcagcctcgaactcctgggctcaagcaatcctcccgccccagccttctgagtagctggaactacaggtgcacaccaccatgcctggctggtttttgtttgtttttaaggaggcagtgtctttgtctccctagctggaatgcagtgatgcagtcatagctcacagcagcctcgaactcctgggctcaagcaatcctcccgccccagccttctgagtagctggaactacaggtgcacaccaccatgcctggcttttttttttttttttttttaatttttttggagacagggtctcaccgtgtggcccaggctggtctcaaactcctggcctctaggttttttcccacctcagccttccacagtgctgggattacaggcatgagccaccacatttagcaggtaggtgatctgtgtttcaataagccttccaggtgattctgatgctcactgaaatttgagaaccactgaaatatttggttttctacaaaacataagcagttagtaaccatagggtacgcaactaaatagttccagcaggcatccctgaccacagggcattgcagatttacttaagtcagtttcatcttccacctgtgtgagttccagcaggcatccctgaccacagggcattgcaggtttacttaagtcagtttcatcttccacctgtgtgagttccagcaggcatccctgaccacagggcattgcaggtttacttaagtcagtttcatcttccacctgtgtgagttccagcaggcatccctgaccacagggcattgcaggtttacttaagtcagcttcatcttccacctgtgtgtccagtttaagctctcagttgcagtttttaaaccaatttccaccagcatatactgagtatccgctaccgtgcaatgcgttgcggctcttgtatgtgcactatgagaagtaattcccataatacggcaaactcagttttgatatccaccaccccactttttataatggactacatttttcagagcagttttaggtttacaaagaattcaagcagaaactacaaaaagttccctctacctctcacttccccactccccaacagtttcccctggattaacattttgccttagtatggtacgtttgaaccaatatcgatacactattattaaccagtattcctgttttaacatgagaggcgactttttgtgtagtatagtctcttggttttgacaaatgcttaatgctgtgtatctattattacttatgacagtatcgtgcagagtagtttctaaaaatcctctctactccacctattcatcccttccccactccccctgaaccactggcaaccgctgatctttttattgtctccgtaattttcccttttccagaatgtcctgtggttagactcatggcatccccttttagcaactgcagaaactaagaactgtccccaaggataaaaatttttgcagacccactgagctgggatttatacttagacctgctgaattgaagttttgggtgtgtttcttctcaaattgccaaaattccatatggacgacttttcttttccttccctgaaatgtgtttaattgactttttctgttatttgtgtttgccttcacagtgaagacaaagtagtagaagtagcagaggaggaagaagtggctgaggtggaagaagaagaagccgatgatgacgaggacgatgaggatggtgatgaggtagaggaagaggctgaggaaccctacgaagaagccacagagagaaccaccagcattgccaccaccaccaccaccaccacagagtctgtggaagaggtggttcgaggtaatccaccatttgcttggattccccccacccccaaggaaaagaaagcgtaataccagagttggaaatatccaccctagcaccactgccttccccaatcaaaaacatgtttttttttccaaaaggcttcttatgcttgtgaaatttttttggtttaacaagcaaacaatttcaaataatgtgaaatctttattatacagtttgttttgtaccttgtatatgctgcttggcaaatcccaagttaattctacaagactccgcccaaccaggtagtcatctaatttgacaaacactgagttaggtgactccttggtattcctttggcagtgagtgtttgttatataatattgtctgttaccacctagacgatgagctccttgagggtaaggacttgattttattcagtattgcacagagtgcctggcttgtagtttcgataaatcttagttgagtgagtagttgtgattagatttcattaaagaaggagatttgggccaggcacagtgcctcacacctgtaatcccagcactttgggaggccgaggcaggcggatcacctgaggccaggagttcaagaccagtctggccaacatggtgaaaacccatctctactaaaaatacaaaaatgagccaggcgtggtggcacgcacctgtaatcccagctatttgggaggctgagacaggagaattgcttgaacccaggaggcggaggttgcagtgagctgagatcacaccattgcactccagcctgggtgacagagcaagattgtctcaaaaaaaaaaaaaaaaaaaaagatttggtgagtatcgcattattttatgctatgaattttaacagaggtgatttatgttgagtttacattgttttattgggaagtacggcagtgctttcttcaagaagtaaatatagtattaatgtcttagactttctctattgaattaatgtttgtgttgcaaatattgtgaactaaaagaactaaaggtcatacttgtctccatgaaataaaaacaaacattcagttgatattaaatgaccaaatgttacagaaacgagtaaactgttggattgagttccttaaagagtatgcatttgttccttaaagagttctgcatttcatatctgccatctgcttggcagatagtaaaagatgcttctagagctagattgaatgaatatgtacttactgaattttaatgtactgcaaatacttataaaggtcaaccacaaatgttacagcatttacaaaaagtggctttctctcactttttgctaaagtttaatgatttcagatttattgttctattagagcttaacatgggctattttgtctccctcaactatattcatagttgtcactatagtattttcttccctttgttgcattttttaccttattaaggtgtaatttacatataagtttcatttgcttttaagtatataattcagcggctttaagaaatttgccaagctgtgcaactatcaccataatctaatcttagaacattttcgtcactccagtaagatcacacatactcactcccagttaagccctctactcacctctagccccaagcaacaactaatctactttctgtctctatagatttgcccttttttggactgttattataagtgggatcatataatacatggtcttttgtgtccgacttctttcacttaacacagtatttttgaggttctacatttctttaacttgagcttttaaaattgagattattctgaattaaacactcagcgttagcttaaaatttattgaaagttttacatgttctttgaaaaaaaagaacagagtgcaagatggattaagtttatcattccctacttaatgacagtttcttactcactttagcacataagtaaatgtgctagtaaatgcgcattttgtttaaaccaccatttttcaaatactgagacatgctttctcagggtgtttttcatacaactgttaggaccaactatggcagatctggtcaaatgaacttgttagcctgatgcctgtagcagggaaggacagcttttcagggcttctcttctcgaaacctaaatgaagtgtgaatacaaattacagcagctagcagcctgcagtgggactgaaagtccttggtgaatctccatcaagctgggctgtttaatagaaccagtttagtgtcccattttacttgaaacattagattttgagcacctgcttggtacaagccattttgctaggccatgtggaatggatgatgagcacacacagaccagctaaccctagtggatgttaaaatctcttaggaaatagaagtcaaagaagtacaaagccatctgtgttgtaagaaatgtgaacacagaacctgcctccgagagtaagagggaacttctggattgatcagagaaggttccatggagagcatgacatttgaactagagccaaaagtgtgggtgggtggtgtgtctaccagtggattttgctgtagagtcatcaggactagcaaaacaaatgtggtgccatggaaaggcatatttaggagacaggattggtccaatttaagctagagcagatgtcttttaggttgggaccaaaatatagagaccttcaatgccaggctggcaaagatgggcattaactgcaggtgattaattaacaaatattaattcagaagctactgtgcgctgcagatttttccaggagacaataaagagattttgttttgatgctagtactgttgaggtaacaggtgaacaaggagtgacatcagttatgcagtacaatgagaggatgccacataaacttaggcccatattctagaacaagacaatttgcttgagataaattggtctcattatcgtctgcattagtccagttctttttgcttgagttttgcaggtagtattatttgatattaagacggaacacagagatgttgtattgttttatttcctgtagaaagacgaaggcagttaaaagaatttcataaacaaaacactccaggctaaaggcaaaaaagaaatgaaccttaaaaaataacaagttaataattttgttggcaagaagagcaacaaaagcaaccttctgaaagcaagatacctggtcattgagagatagcaactgttaatgccccagaaatagaggaatctttaatgcaggtccattcattccacctcaaactcctgaacaaaagctctaattgaggcaagtcttcctgggaaagggggcctaacagaaacatgttatggtcagttgtgcccatgcgagataatttttttgtgcttgtagctaattccagtaaagaagtagatgttttagagggtaacgttaaaggggtcagctgcaaagagtccttttcctcctcctcactgttacaaaaggtgacttgtggttcttccctaattgagagcaatggcaacgccataggtgattactcattttgtaaaactctaattacaagtaggttgcttctgtgttcaacataaaaattagaagtgacttgcaaagatgagatactgcagggaggcttacaatcttgttttcagtgttagtgtttcagtacctggaacaaaatgtgatttacagccatcctttctaagaaaattgtcatcattaccaacatattgctactgataccagtccttaatgtgcttcataaaaaactcaataatttcataacccgttaaaaccggaaagaaatggagggaagaaaaataagacacttttagcgtagtcataatcttctctgccatattgtgttagaatcgatgatacccaaatgagaagatgtctgttctctgtcactgattccagtagaataaaattattgtttaaaagtaagcacatccgctgcactccagcctgggcaacagagtgggaccctgtctcaaaaaaataaaaataaaagtgagcacacgattgcaagatctatctggttttgggggcttattgtcatctttggttgttaaaaaaatacttggatattattggttattggtctagtggaataagccattaccgatttgagtacaacagtggtgtatttagatacttgctcctaattttctgttcttcaagaagggattgtacttcagaaaccagagatatcagggtagttttgattgagccataaattctaaattctgattgaaatgggtattgtaataaatggcataatcttttatttaatctagccaattgtgccctgtccagaggaactggacatttcttccttatgttccatttattcagcaactattcgttgtacccctgctgatggctaggctctttgctactgtggaaggcatcgttggggcagagcagacagcattttacctcctgggagactggcagatttttgaagcctttgttgcagatatagattttcacggtcaccactcttgccctttaatgtaatttaaatttttttttttttttttttgacacgggattttgctatgtttcctaggctggattcaaactcctgagttcaaacctcagcctcccaagtagccgggaaaacaggcctcttgtgctttaaagcagtgattctctgtctttaaaccttgtaactatgctgtgtggtggaaattttacttccccgtttaaagccaagatctctaaggccaagaattttttttttttttttttttgagatacagtctcgctctgtcacccaggctggagtgtagtggtgcgatcttggctcactgcaagctcggcctcccgggttcacaccattctcccgcttcagcctcccgagtagctgggactacaggtgcctgccacgatgcccggctaatttttttgtatttttagtagagtcagggtttcaccatgttagccaggatggtctcgatttcctgacctcatgatctgcccaccttggcggcaccccccgccccccgccccccgccccccacaaagtgctgggaatacaggccaccatgcgtggccgaaaaaaatttttttaattggcctgggctgggcgcaatggctcatgcctataatcccagcaccttgggaggccgaggcaggcggataacgaggtcaggagattaaggccatcctggctaacacggtgaaaccccatctgtactaaagatacaaaaattagccaggtgtggtggcatgcgcctgtaatcctagctacacaggaggctgaggcaggagaatcgcttgaacctaggaggcggaggttgcagtgagctgagattgtgccactgcactccagcctgggcaacagagcgaaacttcgtctcaaaaaaagaataaaataaattgtcctgggtcacataactggttaagtgatgaaatcagaatttggacctagataggccaggatatttctgctacactcatgtcaaaattacactttttattttctttataaatacacacaaattcatttcaacctgtgttcccttgtaaatgcatatacctttgatataggcatatattcatctattattttacactgtgcatttctgaatttttagaatttttacttgaagtgatcaggctggcgctgtggctcacgcctgtaatcccagcactttgggaggctgaggtgagcagatcacctgaggtcaggagttagagaccagcctggccaacatggtgaaaccccgtcttcactaaaaatacaaaaaaattagctaggcatggtggcgcgtgcccataatcccagctactcaggtggccaaggcaggggaattgcttggacctgggatgcggaggttgcagtgagctgagattgcgccactgcactccagcctggcgacaagagcgagactccgtctcaaaaaaaaaaaatagaaaaatgatcgggggtccacaaataagagtaatgatcaagggtcagcaaattggggccaaaaatagcctgttttcctgttttctacacaaaagttttattaggcacagcccatcccatttgtttaaaaattgtctatggatgttttcatgttttggaagtagagttgaggatcgcaaaagagattgtgttgcctgcaaaactgaaaacatttactatctggccttttcagtaaaccatttgctaacccctgattctcactataagacggtgactgtgaagttctttctatttcacatactgccatatcaagttgatttcttttgaggtagggtttgtttttttttggttagagatagactagtatagtgtttgagagaatttttatgaccttgggccagttaagtaacctgttttttatgtgtgtagtgtagatggtaatgttatcttgcatgtttcttgtaagaatgactttaggtaacttatgttaaacgcttaccatcatgcccagtaagtgttcaatttacaaactcaagctgtccagattcaaatctttgccttacaagctactaactgtgtaaatttgtataaatcaaataaccttgaatcctcattgcttctttttgtaaaatagggattaataagacctatccaatatttaactattttgtgaggattaaattaattaatttataggaaacactttgcataattcctggtatacagtaactgctcaattaaccttagttgctctcttagttatggttatatcatcattccgatcctccattgcatttgaaacattagcaaactaatgtttactactaatgaggaatgttaaaggtaaaccaataagttgacttttaattataaaaggcataaatgtaacctatccatatctattggtataataaagctgatatttagagagaacattatgttatgattaaaagaaacatttcttgcttaaattttttttgtgtgaatatacactgtatattgaaatatctgcacttaaattttaaatccagctgaaaattggataagatagtattagatgccactgcatttcaagatagagttttatttcttgcaggtattttaagccttgtgggagttcttctgttaagtgaacagatagagacactgatacagatggctctttcaccgtctcatgtgatgataaaagctaaaaggtttgatccgaatattgcttatattgggctaagtgattgaccttggcagaattaaattatttttcttcttctggtgacaattaatctgggagaagtaccatttgatttattgctatacatttcaccaatatccacaaggcacttgtaggtaccagacatggcattggttgctgggggcacagagataggaacaaagtggcttgctcaggttgcttctagccatatctgcattgtccttgagagggatgagtctctcaggcctgcctaggaaggaattttggcagcatggagaagagaaagtgctcagcccggaacaaaagttttcacctactatgttgcagagaagttggcgtatcagtaattataaaggaagaatagggatttactgggtgatagagcaccaaatagaatgaatgcaatacatacttgaagtaaatcagagtagcttgtattgatctcaaggggagaagaaacaaagcttagcttaattctcatgcctctgttgttacttgtttgtaatggacatgacacttacaaggtatcctataattcactaacgggatttttacttatgattaatatttaactctccacaaagcttggggtaaactgtgaacttaacttgctgtgaacccgaacatgaactcacatacttcagttggaggcctcagtagtagcatgctgtacaaaaatgaaactaaagctccagggagtatttgggaacagggcaaaagggtaatggctcctccttatagagcaagcctcaggcctttacctttgtgttttgaagatggagaggatgcacttctactctcgcccgggttgtagcatgcttgctaatgatgtcaagagaactagtgtcagcactgaccatagatgtgacaggtaacagcctgttattttgtgccccatgtcatggcagccattgattccgaggtgtttgatacacactttgatagaggcagagtgaagcaggacatggacaagcatctttccgtgtagtttaatggtctcaatctagaaagcccactcagataattaggttgcttaaaatgtgatgagactagggaatagagccatatagaagtgtgtgtgagagagaattcagtggtttagtatattcacaaagatacacatttgacaccagcctgggcaacatagtgagaacctggctttaccaattaaaaaaaaatagaatagcagaagtaatcagtgaaaggcattttaatacaattatatctagatttattaaaaataaaattttagtccaatttaattaaaggccagaaactagatttttaaagaatattagtctttctcatattttccccaaatcagttgctttaaaaaaaaaaaagtgtgcagatgcctcaggcacaataactgtactcaactcaagaatttgcaattaagaaaaaaaaaaatcaaacctcaaagaagaaatccagcaactcagaggttcaggttcatttaaacatgcatacatttacatgggcacactttttttgttttgttttgtttttaagatggagtttttgtttgtcgcccaggctggagtgcaatggcgcgatctcggctcactgcaacctctgcctcccgggttcaagtgagtctcctctctcagcctcctgagtagctgggattacaggcgcacacaaccgcgcctggctaactgttgtatttttagtagagacaggttttcaccatgttggccaggctggtcttgaactcctgacctcaggtgatccacctgccttggcctcctaaagtgctagcattacaggtgtgagccactgcaccagctgggtgcacctttttgtttgtttgttttgttttgttttgttttgttttgttttgttttgttgacatggagtctcagtcacccaggctgggattcagtggcacgatcttggctcactgcaacctccgtctcccaggttcaagcaattctcaattctcctgcctcagcttcccaagtagctgggactacaggtgtgtgcaaccacacctggctaatttttgtatttttggtagagatgggtttcaccacgttggccagactggtctcgaacttctgacctcaggtgattcacccaccttggcctcccaaagtgctgggttactggtttgagccaccacacccaaccgggcacacgtttttagccaagccataggtctgattaagtacagtcagattccttgagcaggttacaaagctgtggatttgaatggagatctttagttcccttgcagaacaatgagtttccaaaagcagagtggcttacagcctaaccagctgcttctctcagcctttaaccattttgccctcctgaaaattcatctttggtttccaaccacctcttccaatatgcctgactttttgtgattctgttagtagaagagtaaaaagtcaaggggaggcaagaatgaatgaatctcatataaaaatgatgctcaagagaatcccttaattttcaagacagcagcccaaattgtaaacattgagacttttacagtgttaaaaaaaaaaaagtgtttacaggccaggcatggtatctcacacctgttatcccagcactttgggaagctgaggcaggatgatcgcctgaccccaggagtttgcaagcagcctgggccccatagggagaccaaaaaaaaaaattgttgttttggctgtagtgtcacaggcttatagtcccagctactcaggaggctgaggtgggagggtcgctggagcccaggtgaggtcaagcctgcagtgagccgtgatcacaccaccacactccagccttggtgacagtgagaccctgtccaaaaaaaaaaaagattaaggcagaggaaatgttaaaggttacgctatatttagttgataataatggtaagactgttcaggtgttttaactatgagagtagggttgcctctttcttaaatttatatatgttcttattgggtataatttctagacagaatatgcaagtatcacagaatatggatggcaattttatgttgcttgcacgtgactttaggttcttatgtttcatgataggagcaaagaaaagtcttgcttgccaattcttatgattgcatctgttctggaaatttactagcatttgttacccaggatttctgaagtgctggtgactgctgcccagtagtcttggtgggcaaagttactaaaatgcatcacgaatccttctggtgtttgcttgggctatggcagggtttctggaccttagtactattgatgttttgggccagataattgttgcggatgattgtcctgtgcattgtaggatgtttagctgcatcactagcctctactcgatgccagcagcacccccaagtgatgacaatcaaaaatgtcccctgggaggagtaggggatagactctctctggttgcaaaacactgggctatggtgttgagatctgcagtgatgagcagctttagatatgtgaacagaagcccaggcgtggtggctcacacttgtaaccccagcactttgggaggctgaggtgggcggattacttgagatcaggagtttgaggccaacctggccaacatggtgaaaccccgtctctactaaaaatataaaaattagccgggcatgatgatgggtgcctataatcccagctacttgggaggctgaggcaaagaaatcacttgaacctgggaggttgaggttgcagtgagctgagatcgtgccattgcactccagtctcggcagacagactgagatgccgtctcaaaaataaataaataaaaataaaaaagtgaacagagaaatacccgtgcaatactgtgtctcatcccccaaagacggagtcttgctgtcgcccaggctggagtgcagtgacacgatctcagttcactgcaatctctgcctccatggttcaagcgattcacctgcctctgtctccgagtacctgggattacaggtgtgcctcaccaagaccagctaagttttgtgtgttttttttgttttgttgttttttgcttttttttttttttttttttttgagacgaagtctcactctgtcacccaggctggaaggcagtggcacagtcttggctcactgcaacctctgctgcccaggttcaagcgattctcttgcctcagcctcccaagtagctgggattacaggcacctgccactgcgcccggctaatatattttttttttttgtagttttagtagagacagggtttcaccatgttagccaggctgatcttgaactgctgacctcaagtgatccatccatctcggcctcccaaagtgctgggtttacaggcatgagccaccaagcccggctggtctcattttaatgtaagctctaacttctgtatcactgctttgcacattgtagataaccagtgaacattttttattgtataagaaaaagtaaaataaacaaaaatatgccaaagcaaatatgataaatacacatttagtaaggtaaaagcaagtatttgataaaatgtgtaatgtagtctagtagctttatttagaaacagaaaacaacataaaatgttgacttgaaacattgcgtatgcatatttgccatgtagacagtgagatatggaggtaaactgctttcctagttttgttttgtttttttttttttttgttcaaaaggaattcactctccccttgtccactgttataaaatagcaaatggtgattagcatctgtgctgtaaccagagacactgctgttcccagctggaatctgtaggttctttgcctgctagagattgtgacaagaagccagttaacatggagaggtgtacatgtcagtcttccccagaaaaggacatgaaacagtaggaccatccttccaacccatgacctacatctagaggcattctttttttctttttttttttttaaaccggaacagaaatatcatctaattctttctttacagagaagtggtataaggaagtacattctggccaggcacgatggctcatgctgtaatcccagcactttgggaggccgaggtgggtgcatcacctgaggtcaggagtttgagaccagcctggccaacatggtgaaacccctcgctactaaaaatacaaaaattagccgggcgtggtggcacacacctgtggtcccagctactcgggaggctgaagcaggagaatcgcttgaacccgggagacggaggttgcagtaagccgagttcactccattgtactctagcctgggtgacagagcgagattcgtctcaaaaaaaaaaaaagaaaagaaaagaaaaaggaagtatattctaagcccttgaattgatcttggctttcttcattatttttacaagtaaaaataaaaactttgatatttctgatgttctgggatattataggaatgataccacttgaattcagctttctaagaagtctggtatttcaatagtcttaatatgagtaagaaaattatgatcttggtactggatctaaggcagaggtatcgaagctgttttaatgttgcttgagataggacagaacttcagagtaaaataaatgtgtatagacaatctgttcaatctgttcaaattaagttgttgagctgtatatttgaatcttaagactactaattttgttgtatctgtcttttcccaaatatatgtgtacttcttttaataagccaaaacctatgcaacttttactaattcttccctaactacttcttttggaaaatgattaaatcttatgtctcacgttttgacatatctattgcatttaaaagataaggttgatcatgctgcttctcaaactgagatatccattcgagttatccaaggcccttggaaaacaatcgttgttgagtctgtatggggggcctgagtcccaggtggtgttgactctgctggtccatgatcctattttgagtagtagactctagtagcgtctcctgccttccatatggtgcagatttgcagcattgagacaggaagtaagaaactgaaaaggaaaaccattcttacctttggtgttattgttcttggtatattacagataccaacaagtatgaggcaatcctgagacatctacctactgagcttttctttccttaaattcacacctcaagaccaaggaaaccgaaaaactcttacagtctccctacatgtgttcacttgtgcccctatttcctgtcattaacatggtagtgtagccaactcctgctagcctgtaaaagctaattattacagtatagaggaattttgtaagccatagccattagtagcttgaaataccaatggtgggagtatttataccatggcagttggcatacactgtaactcaagagtgttctatttgtttgtttttctagacagtgccagtttcccagcatactcctgtctctcattcagtaagaaaaagcacttccccttattttccaatacaggacatgatatcccgagttttgagcttcttgttaatagcctgttgcacgctaaccacgcagctcagtgaagagcaagtttattcccataacaaacaggaaacaaaggttgaggaaaaaccacagtggtacccttttgtgagtgttccctaacaccgtcacgggagtcctgattagtctaaatactttacaagtaaatctccttcaggtggcattttataaacaatctttcatcatggagagatgagaattgggtcaggtataattagaatgacagatgtattggctagcctgagagaattaacgcaattcagtaaaaaggctagccaactgcggatatcttctagttacttccgtgacaaattagcaccatcctcttgtactgaagcagtgctttcattagcatgcacagctgtttgcatcatctttgtttgtatttcaatccatatttggagcttaagtgagatttgtcataagacttcagttcaagcttgcttgcctaattttacatgcttctatttagtaaaatatgattactaggtcataaatatttgataatttattgccttattagagtaattttctaaacatgttttttgacgactgcttgccactacgtacaagcacttgaaaaatgttcttttctattaaaagtacatggttccagaattgggaaaatcacgttcttaaaaaataaccagttttctattgtgttggcttttaaaattttttcatcagtagaatcaaatgcaaatattgtctgcttatttttcaacagaatacaagtttgattttaataacttaggctcatgaaatgtcaccacgtagtaatacttagaattacagcaataacttaggctaaaaaaataaagttgttatgaactacattgagctcagacagatatatgtattatgtaaacatttatataaaatgtatataaattgtatattgtattatataattatatattgtaatatatagtatataatatataatttataaatataatacataaattatatttataaattataaagtttttatataatatattataatctaatatattataattatatttataaattataacgtttatttgaaatattgaagttttgtatacttagtggattttaatatttatgtcgttttcattttattccactgttacattaaggaagtaacttattacaaaaataaattatatttgtcttacatttgccctttttactctacttaaaattggagaaaaagagttcaagatagggaatttctgtcagaaaggagaaatagttgtattatgtgaagtttaagtagatattcttgtagagtatggagaaaataatgctataaaatgttgccttttaaaaaaaagttcagaaaatatagttcctagctctctctaaatgactagtttgattgtgactgctttcccaaaatttgtaaatttaaaatttatacatcacatggaatatagttttatttcacatacattccagtaggctgagaatacttgaaattcaatgattaaaaatgaaataataataaccagctttgctttattctaaaaccagctttattctttatttaccactttatttacagcgaattatttgctaatctgttaactttgcttcataagaaggcattataattatcgtacatttgaaagtggagattttctccccattctggttgccagtttcacaactgtgttcattctaaatttattaaaatatgtaaaatcagctttctaaccttggttgtccacaaagaatttcactccaatttgaaatatctattcagaactaattttttgtggttgagcattattttttgaacaatgaattgcataatcattttgtataatccagggagctctggcttagattctgtattattttgtgttatactgatttttagaaaatggaatgtagcgttgacacgagcacaaatctcagcaagggcctaccttacaaagataaaatgcgtggagttttattagaagcacatgattttgctttgtgtttcgtatacaccagcatttcagtgtagtaaatggcattttgtcttgaagagtgagcagagttgttacaaaagaaggcataatgcttccttgccagcagaattcagataagtgaatatcagaaaagctatttgtgatcttgaaagtgtaagaaattcaacatcaataaaggattgtggttccttagatagccatgtaagtctttgcctatgtttctaacatttctctttaggaaatattcttgcttttatttttctgaacaaattttctccattattatctctgatatttactttgaacagaaaggtggattggaaatcaaaaaataagtttgatttcaaaaatgatttcaaaatgttagttttctcagtattttacattttgagaagagaacaaagaaggcagatgaagagttttttgttttttcttaaatttgttttcttttcaactttatttttaattgacataataattacatatagtatacattttgaagatacggttttaattttcacaggaatcttatttgggtttagttatataaggtctaattttgcatcctctacatttagtggctgatttataaatttccactgagtgataatagtaattaatgtgaaacaggttttttgctgatgtttttagaagtttcagtagattaggaaggaagaaattatgctattgagaaaaatagaaaatgtaaacataagcatttgaactctctcttgagatatttttatcttccatgaaactagatgcggcttattgaagatgtgtttcaggtctcagtgctctaaaactcttctacttggtgagcatcttgattggttagatctcttactaatatcccattgctagagagggatgtaaaggaaattttctcaaactgagatttccaaatcttccaatctctgagtcaagtaaagagacaaggttagaactcttaggcaaactgaaaaatcaatattcctatattatcattatttttttctttttttgacaccaagtctcactctgtcgcccaggctggagtgcagtggcactattttggctcactgcaatgtacgcttcccaggttcaagtgattccagtgcttcggcctcgcgagtaggtgagattatatgtgcacgccaccatgcccagctaatttttgtatttttagtagagacagggtttcgccatgttgactacgttggtcttgaactcctgacctcaggtgatctgcccacctcggcctcccaaagtgctgggattacaggcttgagccaccatgcctggcttcctatattcatttttttatgtgggctttttaaaatcttttcaatagcaaagacttgacaccaacccaaatgtccatcaatgatagactggattaagaaaatgtggcacatatacaccatgaaatactatgcagccataaaaaaggatgagttcacgtcctttgtagggacatggatgaagctggaaaccatcattctcagcagactatcacaaggacagaaaaccaaactctgcatgttctcactcataggtggaaattgaacaatgagaacacttggacacagggcggggaacatcacacaccagggcctgttgggggggtggggggttgggggagggaaagcatcaggagaaatacctaatgtaaatgacgagtttatgggtgcagcaaacaacatggcacatgtatacctatgtaacaaacctgcacgttgtgcacatgtaccctagaacttaaagtataataaaaaagaaaaaaaattaaaaatcttttctttgagacaattgtagatttacatgcagttgaaagaattaatagaggccgggcgcggtgcctcacgcctgtaatcccagcactttgggaggccaaggcaggcggatcatgaggtcaggagatcgagaccatcctggctaacacagagaaaccccgtgtctactaaaaaatcgaaaaaaattagccggtgtgtggcgggtgcttgtaatcccagctactcaggaggctgaggcaggagaatggcgtgaacctgggaggcggagcttggcgaagcctgcagtgagtggagatagtgccactgcattccagcctgggcaacagagcgagactctgtctcaaaaaaaaaaaaaaaaaaaaaaaaagaattaatacaaagagaccctgcatagtcttcactcagtacagtatcacaactattaaattgacattaatcccttaacactgctttaacccaagtctatgctgctgcttctccgtgttcacttctgagaggcactggccatttcttgtgtgcttattcatactttgtgtaaaagcattagcatcatacatcgctggtgctgaccctaccctcagtcccagcttctcccagagtaggctaagattctcttttctactacatggaaaattgttctggaataataaagggttagcaaaaaagtcagagaaaacaaacagttgcattccctttccctgtagtagagtaggaatataattatgagtgatagaggatacgttccattcctttcccagtcctctccgaagtcagcttcactgctgtaggaagttgctgttctcattatttccctgagggaaagtgttgggaagtgagagttgaggtgatggggaatcagggttgctgacaattgggggaattataacgagaagctctttttcaccaggagaggggttgcatgttaagagaaggcctatctgctcatcctccatgtcagcagatgagaaccagttggacaaggtagctgtctcttagagattgagaagtaacaaaagcacactgtcagtcctgttcttccagcctcacgtacatcttctccatacattatgtatttgacattaaattaacatacactgttacacccattcctgaccgcattatctcaggtagccttttgtatttgagtattgtgggatctgttgctattgcccatgatgcccacttggactccaccaaggcagtgaaactcttgggggccgttcaaagtcaagagtgccaactgcccctaacaggattgggagaaccaaccaacactccccgaatagggactaactcactcttttcttggcctttatgaaaggaaggagttaaggctcttacagctggagactccagcaagagttgtaggctcaacgtgtagcttatactatttacttaattaacatgtaaatggattttgagttctgaatgcttgttctagttgattagggctcatttagcctggcttctacgaattagctataacaaatggtttcatagctgttatagaatgaggcagaagaaaataaaatgaatgtagcattatgtttaattagtggtataggaaaatgttaatataatgccatttagattctggactggggagattgtgcctttatcataagtaagaaattgttgctaggtttcacataagggcacatagttatcatgaatcatctccttcgatcatcattcttttatcccattacttgacttgcacccatccaaaattctaccacttttatttaatatatagactcataaagacaaggtttgtgcatctgcagagctgtgatgttcactgcgaggcccgtggcacacatctataagaagacacatatttggtactctaagatgatacttttttttaatgccaaaatgtgagggtcagcataaattgccaaggcatggtaaattttgttgccaatgctcccgtgactatggggtgaagggattctgtgcctcccttggtagcaatgaccacggtgcttgcaatcccagtgccaattcccggcacagtgcaggctctggaggcactgctgccttgcagtcttattggaattaacactgcctgagtaagagattaataatgggtattgttgtgtcttagaaacgttaaagagcatgtgacatgaatatgtacacattggtgaaggagatacagagaaggaaagcaaagtgaagctgtagatgtttgttacaactgaaggtaagctctgggagcagagaccactgctggctatagttgatgggatccacaatgtcaatacaaatggggactaactattgttttacttccctatacacgttgctctttcagtagatgcaataaagtactggtaaaaccagaggtggctaccatcacgatgatgtcaacaggagggacagtcagcactaagcccagaaggtgtcaaacactccgcaggagaaatgcgccatgcaacggacatgaagatgatctgacactcttcacgtggttttcagatggaaacgtggctacgaaagcatcaacctcattatcatccatcattaaggccatctcactcagtactgctgctttcaaagtccacgctcccaaagcaaattggatttctgtacacaatactcttacaggatgaaacccaaccaacttgttgacgtaagtatcccatctacttcgcaattttatttatcttccaaaattaaaggactggcaccctgatttattaaaagtgaattgggtctagggaccatatcccctctgagttactgacagagcagcttctggcctgtgaagctcaaagccatgcctagatgtgatggatccttgtctttgattggctaattagaatcaatctgttgaaggaccagtggcagtggctcacgcctgtaatcccagcacttagagaggctgaggcaggtgtatcacttgaggccaggagttcaagaccagcctggcctacctggtgaaaccccatctctactaaaaataccaaaaaattagccaggcgtgctggtacaagggtaatcccagctacttgggaggctgaggcgcaagaatcacttgaactcaggaggtagaggttgcagtgagccaagattgtgccactgggcggcagtgcaagaccctgtctcataaaaagaaaaaaagaatctgttgaatattcctaacttggaagtaatgggtgatgcgtggctttcatcttttagaaaggtgttttttcctctgtcagtaaaactaagaagacatctgtgtgtgctaaggcgtcagtctagcaagggcagggcacaaacccagagagagaattgggctgttgtttcacttccaataaaaatgggatatacatgggaggtagagttataattctactcaggattgactttatacatgcaattggatgggtcactgattgactttgaggcaatcagggatgagtgaaactgatcttggggagggtggcaagacatgttgacaggtaagatgtgttttaatgtataacagtgcgtggtgtgtattaatcagttggagttgattgactgcgttttattgtttggaacattcctgcccaagggtcaggtaaatatacaaaatatacaaataatacagatttttaatacataaatatcaattaagtagcataattaaataatacattgttatagttgtacttaatgtgtatgtaaatatatacaaataatacagatttttaatatataaatatcaattaaatagcagaattaataatacgttgttatagatgtacttcatgcatatgtaattaaattattaatgtataatatataaatacatattttaatatacaaataaaatggtcttaaatcagagttaatttaagaccatttatattagtacatatcttaatatacaaatgaatggtcttaagttaatgtcattgagtataagtcacatttacagatatgacatgtgtttccagataaagtcaatggacagacagcttccaacactggaaaacattcaaaatatatgcaattaattttatatttgagttaaggcaatcatttattaaggaaagcaatcagatgtttgtgagggcttaaactttcgcttcataaccaaagcagtttccttacatgaaagttgacttcttaaaaagagaagtttattttttataatggagaattgttgtgatgtgcagataccttccgtcatttcatactcatctaaaagcagccaaatgatcttttcacctttggccggaatccttttattgctaccgagtcctgcactcattaaaccagatgacagtgcatgctctgagaggtgtaaatctctagtcctggtggccagttaaattcctcagtaaatgtttggtagatgctgcctaataaaccagtccaggttgccactgggaggattaaaagaagtaaacgtgtatacatgaacagagagacagtgccttttcatgctaaatgtggttccccacatctcctctgattagaggtgtgctctgaacaagccgagacggggccgtgccgagcaatgatctcccgctggtactttgatgtgactgaagggaagtgtgccccattcttttacggcggatgtggcggcaaccggaacaactttgacacagaagagtactgcatggccgtgtgtggcagcgccagtaagtggacccttcttcgagcctggccacctttcgtctctctcgccactgactctgctttttgtaacagattgattttcctggttcttgggaatgggcctgttgctaccactaaccacatttctgtccacttctctaattgctcagagtctccgcagtatgttcaatcatgagcacacctctccgtctttccctgataaagcatggccatggatgtgttctcttcctagctgtagcacatatgtcttgcaatccagagggacttttgagtgcttctcttttaaacaaagctggagtggctgttttgtcttctgcagccagccgtttctgcaaatgcatacttatgtgtttgtccgtgtacatatgtgttcatgtttatgcatgtgcactacctgtgcagatactgtctaccactggaagcctggctgatgcagcttgagttgcattgataaggtgtatggctgtgatgaatacctttaagttggttcataacatgtcttttattgtgctgatgagggaatgtgattgaattgagctcatgcatctcaaatgccggagggtagaagtgcccgtcttgccccctccgagctcagcacacagacatttgccaggtcaaacttctgcttcttctcttgaaagtagaagaaaacttttgacttaacgtgagaaactttcaatgacataaggctcgaggaacataattttattttttttgtttttttaaagacagggtctcattctgtctcacaggctggagtgcaatggcgtgatcttggctcactgcaacctccgcctcccgggttcaagtgattctcctgcctcagcctccccagcagctaggatcacaggcacatgccactgcgcccggctaattttttgtatttttggtagagacaaggcttcaccatgttgaccaggctggtctcgaactcctgacctcaagtgatccacctgccttggccatccaaagtgctgggattacaggcgtgagccactgcaccccgccagaacataattttcaaagtctttctcttgaacattaagcttttcataattccgggggataaaaatatgaagtcatgatgacttaagtgcatgatgaaattttccccaaagaggtaattctcaggaggtccagtaccagatgtgagacttccatgtcgttaacagacttccaagtgaaattcccaattgtgcttatttatttatttatttatttatttgttgttgttgttcatgagtaggaagtatgaactactcaagaagtaattattcagctcagcttgataactaaaaatgaaactcaataactgtgtattacttttttgagagactcctgcctaattctccgctgtgttgcaagggtggcagccacatttcctgcctgagattcctagggattatataaattgttttgcagcaagatcttaggattaagcaaaacaacagaagggcctgcaccattaatacccccactgtaaaggagcccaggatctaagaggaatgtaatggaaaagctcctgttggtctcctgccatcgccagtgaatgagatgactgcttcagtcccatgtgtgaacaggtgtaggaactgataacctcaagggctttttttttttttttttctggctctgattggatgattgcagcttctggctcaaaggactcccttcttcagtttcaaacaaagcagtcaattaggtcaggtattgcgaacacaatggagaattctgttgcctgcagcctttggaacaaaggccttttgttacagtgattctcactggtttagccggtgggagaggtttcctggcagatttgcaacttttttctccctttccctgggtggattcattttctgaaatatcatgtatagtttttggtaataagagatttatttggttttaattattagcagtgatgaatttgcttcaagagattaaaattctctccacctcaccccagtactgccatcccttcacctaacactctctccctttgatcagtttgggctgggagtgaccagtgggcacctgtccaggtgtcctgggtggcacacagtttgctgagggttttgcaaaaggtcgatgctcccaacagagatgtattagatgaggctagctatgcctgattttagaggggaaaggtgacagaataatgtatgaagaaggcaaaggctgaagatcagttagatgggtggacaagaataagtagagagtataagcctcagcaaacagccagagccgagagccacatgctgtcctatgaatgagtgaaataaatggagtttttgtgaaaaaatgcatcgaagggaattggggatatttggcacaaaaggagcaagaaatcctcttctgttaagaaacctgttgttactcggatatactatcagagacaaaatatccagcattctcaaatgttaacttcttacgaaaatagatcttatgtttatatgttcattttggttttgttggagggaccaaacctaagtgagtgattttgtttgttaggttgtttttttgtcagtggactcgtgcatttcagccatcattcccatgtttctctttttgtttttagttatgttctcttattttttccatagtgtcccaaagtttactcaagactacccaggaacctcttgcccgagatcctgttaaacgtacgttgtcattcacctgagggaagggaagaggggaggaggatgctgcttggttcacataactccagcatcatcaccttctttgcatggttttgtgtttcttgaacacctgtcttagtaaaatgtttcttcccattaccttgcttgtaattacatctgattttgccagacagcttgagatgttgggctaagaacatcattgactaagtttcttctatttctgaccaatttcctttttatttagtctggttttattgaatattatatggacaacatcattgtattgtatttgccattactattttatttcctaaaagctatcagtgtaactgagagcaggcttagcctctcactgcttttgcagaactgaagaacaagggctaggtgcagtggaaggaaagtgactttacttagcaaagctagcaatggggaaatggtccaggctcctgcctcaaagcaaccatctcaaattttggattaaaaaacaaaggcttaaaaaggggagcttggaatgcagggcatgaaggaggggtgaggaggtgctgctatacaggacttgttccaaagacttgagttattatccagttcggtaagtgggctggcgcatcccgcacaatcgggttgtaaattaactgcagccttgaggtgatctcctgatgagggagaattctgaaggtgcctaagtcagtcagtggaacttctaagcaagcattaataattttaataataattataagcgtaattagataatggaagcgctgtgcagggagtgcctggtgggaagaaagagagcaaaggttaccatttcattactaaaactggaaggaaaagaaaggaagaaagatctttaaaatagagtactcggttacatcaagatgccatgatttaacaagagactataatacataagtaacttgtttcctcagaaaaagtacttaatattcatggtattgtagtacatggactaattcgtacacgcagatttcaatttatgtgtgttataagacccggtttcaactttagacatgaagggtcacttttagacattaggaacccctctttctcctctcccagaaggcataatggtaggttagaggtgctcaccttttgactaggaagtagagaaagagcctcctataaagaaatgcattgtccagccactgcaggccttacttacagtgtcttatgttttgtttttatttcagttgtaatatcagacgagtttagttttaaaatgtggttttagtactcatatttgaatttggattccatccagaaatagatttatccagtgttaggttagggatgatatatgccatttatgcttatgattgctggaagaagaggcacaatttcagttgtaacttagatattttataattagcatttgtgtacattatcctgaaaaaaaaaaaccctcatctcaaaactgatgaagccagttatcttttttaaagatgataaattatagatgaaggattaggtattttaaaaaagactgcatcctaaactataaagttttttaatggcctccataaaatattcagaataattcacattatgtataacttttgaaggatgtggtttgtactgctgcaacataaacgtttcttttgctgttgtgaaaaaagcatttttctctaaaaacactgtaagtacagcaagtgggttgacagactaggaaaaagctctagctattccactatagtgttgacataggtacgcatgttgagttgcattgtaccgagcattttcacagatcatttaatttttcttcagaacactttgtgggcattttcctcattccttttgtacatacgagaaaaaatgaggcttcaagagcttagtgacttgtcccaagccatcgaacatggcaggaccaggctttgaaacccaaaatgacgttttggccgcactccacaccaaatggctaagcattggttctgacattgttttgccggttagtgaaatcacatttgcgattcagaagcacattttaagaatacagaaaacagtgaaaagaggatgaagaatgttaacattttttcctaaatgccatgaatagagcacgcatcagtaaattaaatgtctttcccattcttttataaaacagtgattatttttctcttgtttcattttagcatttataagaattctatttttccatttttaataactgatggaaacaagcatcattgtctgataaatttattttcatgctgtacacgtaactaccactttcatcatccactgttccaaacagatactgaaagtctcttttgtaattttctccttcccagtaattttctccatctacttgcagtgtatttgggatcctgacacctttccattctaggaggatgaagtgctttgggcagctatattttcttgtctgcctacagagactattcaatcacagcaagtgaagggttttgcagtgctagtacaaacagacaaggaaaaaaacatataatttctagttatttatagcctgtgcagctatgtggtcttatttatagcaaactgcacatttgatttgaaaaagtcatggtcatctggaggtcaaattcagatggcagactcaattcagagaaaaggagctgaactagaaggtaagcaagcctgttagactgggcaacttggacttgactttgctccttcaacaatctagagccagttggatgatatttctgcacaaaggtggttggttttacaggttgctcagtctaagctgcttctagtcaaataacaaatgtgaaaggagatagaaaaagctcttcagttgaactgataaaagattacacttagggagaaaatgtatgatggtttgcattataaaaacaataatttgccataaatcaggcatttctaggtttcaaacttttgtcataaaaaccaattttgagcattgcaattttagggacatattttattgttgttattttaaataaaaatctaaaccacaaatataaggctgagagctttcattttattcgtgaacataggaattcaaatcattaaaaaaaaaccctttctcatttgggataaagaatcttacgagagctgagttaatttctgacattagttttgcacctgcccatttgggtttaggacagtgcaaaaggtttcacatttaatcttcaaaatatagtatttgtagacaataaaattatataaatatttgtggattcatttatattttaaatatgagagtgtgaccattttttctggtgctgtctccatcagactgcatcccaaaaggcaaacagaccaactccttaatggcatttaatctctcaaagagcatcatgccaatttttagtcagcagattgcaccatgtgatctggccaaagtgtgtcccatctcaggctccttcatttgcgctgacatgtggtacaaacaactaaaccaaggtttctcaacctcagcactattaacattttgattcaaataattaatttttaggagtctgtcctaggcatatgggtgtttagcagtacccctgacccctacccactaaatgccattaacacaactccagctgtgataactaaaaatgtctctagacattgctaaatgtgcccagggggtcacattctggttgagaatcctgttctagagtagtagtttccccacatctgactcagagatagaactctcctggtgtaaacacgtgtactttccacaaatttgggggcatgttgaaatgttagaatgtcagcatcatccaattctcgacagatgtttgaaattgaatttgttagactattgtccaagctctcaatatttgcaaggtaaagtggaagttgctgttgctgtcctgactatagtattgaaggtctcgtagttttcctgctctaatgtaagctactgtggcagcagaagagaaaccagcaaatcccttagtttgaagtcattggttcacctatgcaccacccctttctcctctctgtttcatcttagtttcctagaatcccaggatatgctggaggacaaccatctgtagagatgtcctatagtcttgctacacaggttatttgtactttaggattatgtttgatggccttatagtttgtgcagaggtgtaggcctgaccccatgcaggattgagggagggaaaaagattgatttctaggcacatcagaatggtccagatgacatgaaacagactggtacacttacagagaatatgaaaagaattggaacttaacaagtcaggccccaagttccatccccaggttccaagtttgttgccgcagaagctcataattttcaaatcgtagaaaactcacaccacgcagcctttcaatggaatatgccaccttaaccccagggtcgttgtaaagacaggagccataagacagaagtctgaatgcctaggccatttaatctttggccaaatttgaactattgttcttaatcacactattcttgttcttttcactgtgcagtagcaaatgttagttcccattagcacattctgcaataccattggaactaaaactgccaaattagattaggcaacctgggattacactttgctccccaaccaacctagggagggagaacaattttaaagcattaaaagatgtgatggtgaattaaactacctgtcacgtcagtgccagtatattctatcagattaacaagtgtgaaaagctaaatctttggtatctggaaatgcttagataggaagaatggctttttcttcaaagccataataattagagatgaccctaaaattgaaaggaactggattgcttagcaactcagcattttttaaaaagaagggccatctactttgaatacaggttaaatatctcttctctaaaatgggaccagaagtgcttcagattttggatttcggaatattgatgtattcatgatgaaataacatgaaattcatttatgtttcatgtacaccttatacaaaagtctgaagataattttatacaatttttttttttttttgagatggagtctcgctctgttgcccaggctggagtgcagtggcgtgatctcggctcactgcaacctctgcctcctgggttcaagagatccccctgtctcagcctcccaagtagctggaatgaatgacaggcgcctgccaccacacacagctaatttttgtgttttttagtagagatagggtttcaccatgttggccaggctggtcttgaactcctgacctgaagtgatccaccagcttcggcctcccgaagtacttcgattacacgtgtgagccaccacgcttggcctatacagtatttttgataattttgttcatgaaacaaagtttctgtacgttgcactgtgagagaacaaaggtgttgctatcccagccaccatgatgtcatgtcagtgctcaaaaattatcagattttggagcatttcagattctcagattagagatgttctacctgtggtaaaagaatgttcattatgtctctgctctgttgtttagctatttgccaaaagagggtaagtggatcgtttaataaagtggtcagcaaatatttttcatacaaggccagattatagatattttaggctttgtagatcatgcagtttgtcataactacttaactatgcagtggtagcatgaaagcaacaatagacaataagtaaacaaatagacaaggctgtgttccgataatactacttttataaaagtagccagcagctgggtgcagtggctcacgcctgtaatcccagcactttgggaggccgaggcgggcagatcacctgaggtcaggaattcgagaccagcctggccaacatggcgaaaccccatctctgctaaaaacacaaaaactagctgggcgtggtgatgggcgcctgtaatcccacctactcaggaggctgaggcaggagaatcacttgaacccgggaggcagaggttgcagtgagctgagatcacaccatcgcactccagcctgggggacaagagcgagacttcatctcaagggggaaaaaaaaggtagccagcaagctgatccttggtttaatacagcaggtttttttatttttatttttattttttttccaatagctttggggatacaagtggttttagttacggggatgaagtgtatagtggtgatgtctgagagtttagtgtccccatttcactgagtagtgtacattgtacccaatacgtagttttttatccctctcctccttcccactcttcctcattctgagtctccaatgtccattatgccactctatgcctttgcataatcatagcttagctcccaatttataagggaatacatactgtatttccattcctgattacttcacttagaataatggcctccacctccatccaagttgctgcaaaagacttttattttgtggtttttctggcctactagtattccgtggtatatatacaccacattttctttatccctcattggttgatgggcacttaggttggttccgtatctttgcagttgtgaactgtgcagcagttatttttgaccccaggatgtgcgaggccaggtattttgagagacaccagcaaaggaatctgagtactggctatcaatacctgataattttattaatgagttgagacccagatatgccgtagaggtaaataaccatataaaggaaatatagaagtgtaggagaagattgctctggaaggctggggtaaaatgaaatcagctttatccttaagacctccatagaggttaactgtaccatctccttttactgctacagtttatatgaaactggacaatattgaagattttgacttttcgaactcatctattgagtgttgagcagctatgacaggttatttctttatgtgcctccattaacgaagtcaagaatagcttctgacaaattgacaaaaaacaataacctaaggttaacccattctggacgccagttattgctattgcttcacatatattttttagattcaaacttgaggttgcttttaagttttagtgtgatgtgctgaatagagaatagatgttaataaaaaaataatgccagcattcgttccttcacattcagttcatatatttgaaaaaattcccatgtcagtatgtgtccatggacataaaaaagaaatgtagcttgactagagtaaacacatcatagattatatttttattaccttatgtccatgtgatgcattgatagtgttctccaccaactatgattgcactgactataaaattgtaatacaagggcatattagggggagaatgcctttgttttttcttttgttgttattttgtttttaagagagtctggtattacactggaggatcacaaactgtattttcttgttataaatggctcctctatcttggacttaatggttaggataaatatttgaatgtagaatgcgttaggagttttaactatttttgaaattaggaaaatggagagacactttttttttttttagagacactttttttttaagttataataagcatggcactcggaaagctctgccatgtttcaagattaaagtttcacatgaacgctaacaagtttatatttcactcatatataaatgatcctccttgtctcctttcctaaattatagccatctcaaatgacaacattgctgggtcggtatcaaatagcattttcaatgataaggcaatgatttatataggtcttaatttgttttaatcttctgttaccaaggctgtagagataaattgcttttctgctgatgaaaggagactaacccaattttcttgttagaatctaatattaatatatcgactgaatgccattcataagccttggtttagggaaacattcagccttctggcctgttggagatggccacggtcattgctgtttgaaggtgggtcatttcttcttttgtgtcctgagtccattgtgactgtaaaattatgggtcaccccagagcctgaggaaacaaatgcatatcaaaatgataggggcaatctttcacagtgcctttaattttgaccccacattcttatatgaatgtgaagtaccacattagtatgaatatgaaatggagtgctccgcaatgattacaaaatcagaactaaaatgagggaaatcagtgcatgtacagttcaacttaatggattatcctctaaggagtcttcagacaggctaggagagtgacgtctgcctcatcctgaagatattagcaggttttcccctgttttaaagtaacttcccttcaaatgctaacagttttctcagaggaaacacaggtatggaaaatgtttcgttggtgtcttggccccagtgatggaggagcattttgtgataggaacgttgggtgcagcatcgccatttatgaataaactgaaagctaacctgtgttacttcaccccagaaaacagagctctggcaggtattgagaatagatcacagtgtgaagtggcagtattgtgacaagcatgcgtgtatcagtattaaaattgaaatgagccctcacgcacatgtgaaagcagtttctcccgttttcatattcagttccctgaggtaatacagcattttggtgtgagagaaagaagggaatctgacccttctcgtgtgggaagggggctgagggcaacaacctcctgtgacagccaccctggtccaagccaccttcatctttgtctcctttttttttttttttttttttgagacagagtttcgctgttatcacccaggctggggtgcaatggcacaatcttggctcaccacaacttccgcctcccgggttcaagcaattctcctgcctcagcctcccgagtagctgggattacaggcgcctgccaccacgcccagctaattttagtatttttagtagagacagagtttctccatgttggtcaggctggtctcaaactcctgacctcaggtgatctgcccgcctcagactcccaaagtgctgggattacaggcgtgagccactgcacccagcctgtcttttcctcttaaaagatcttccttctacttttgtcccatagcagccagagtgatccttcaacaaaacgccccatcacatatactccccctcaaacagcccacgctggtccctcagaatccttactgtggctttaaggctgtacatgatgtcccccatttcttccctgcctctcccactacttcctctcttgcttctttagctctggccatgcgggtctcgtggaatttgccagccagcttcaactcttagggcttccgtgctagttttgtcatctgcctgccatgtccttccagcagccagctgggaagatctgaatgtcacctcctcacttaagactctgcctggtcgctcacttactgcggtctacctttcccctctcccctcagctctcccgatccttctgaactctgctctgtttttctttttcctctttttctccataatacaaatcacatattaacaatatgacttactggcttttaaaaaattcttgtggtaattgtttctttccctagaatataattccaccaggatcagggccttcatgtttttctcattggtttctcccatgtgcctcacatataataagggctgcaatgttggtgggctggaggaataaaagaatgaacaggcgcactaaaggcaggatagtttgtccatgtcagagctgctgtctcagctgctttgatacctctgacttcccagggtggcaaagaataaggatgtggcttatgtagaaggcgttagtcatccaaaatgccactgtatatttggaagcaaatattcaccttgaagcagtgatgtactaggaattagaactgcttttctgttacattttttcatttgttatgagtgtttagatacacatgatcactattaaaaggaagggaggtaatagcctatatatcctaccatgcccctcaaggctctgttaggagactaaaatacaaaggtcatttaaaaagttaaaagcttatgcatgtgatgttggtattgctgctaatgactaggcatctagaggtcaaaacctagagctaaggatattgaaccctgtgttttgtctcgttttaagtctaggtttttgtggaggggggaacatacctagccagcttgcttgcagaaggcatgagtgagcaggctgaaggagggacccaaggccagaacgtcctccatattctagctccatgggctctttcacttgatccctgctttatgacccaacttctgttgaaggatttgccagatagtgtttggggcaggaacagctgtttcatagaaaacaagccaacggacatcataacaaagcatatggttgttttgccaagttgtgctgctcattaacaaaacaaaacaacaaaaaccctttacagtgccccagcatgtggatggattggccctttactactctaaaaattagctttacagcctttttatggcttacccaatcttaacagactttatttgtgtgtgtttagggatgcaaatgggtatgttaaatgatagtgttttgcctctacgcaataaaatagggtaattttttcttcccatgtattaaacgagaacacagaacatgcctagcatggtgggctctgatgaaaagaggctgttatcatttggccaacatggaaatcctagcctttatttatttatttatttgagacggagtgccaacatggaaatcctagcctttatttatttgtttgtttgtttgtttgagacggagtttcgctcttgtagcccagactggggtgcactggcatgatctcggctcaccgcaacctccgcctcccaggttcaagcgattctcctgcctcagcctcccaagtagctgggattacaggcatgcgccaccacaccctgctaatttttttattttattttattttagtagagacggggtttctccatgttgatcaggctggtctcaaacttccgtccacctcggcctcccaaagtgctgggattacaggtgtgagccaccccatccggccgaaatcctagcctttatcagaggttccgtggaatctcagaggtctgtgagcaggataaactgctttatggtagtttaaaatgcaaaaccagaaataaaccctcctaaagccagtttgtttccactttctaagtggttacagtgacctgtgttttaagtaccttaaatatatcagtgacctgctgatatacagcttcctgtttcctctgtgtcctgtgacatatcctgacattccttgagccccactcccttcccaaaaggaagtaccttgatgggtgaggacatagggcacacgtgtctctggccttctgtggacataatcacaaaatggtagtcagtcctatgaatttaatctctttaggatataaggatattcacgaaatagaagttgagctctctggacatactccaccttaaaattgctctctccttccgggatcctcaccagctgcagagcagtagtaatgaactattaaattcatttaacaatatcagcatatgctatccttctctgcttgactagacagtaatctggcttgctggttggtatgaatataggataatttcactcacactaattgagatggggagtttgtatgaatggctgaaaaatttgagttaaagataaaaagagacacagcttcctcaactatgggaaataactgggactgttaacaaagatttacttgaagagaaattgtattgctcagggttctccagagaaacaggaccaataggatatatatgtataggaagagattgattctgcagaattgactcacacaacaattatggaggctaagtcccacaatctgttgtctgcaagttggagacccaggagagctggtggtatgatttagtccaaatctaaaggcctgagaaccagggaagacaatggtgtaaatttcagtccagggagaagagaagaccaatatcctgactcaggcagccaggaaataaaaagggtgaactgctccatcctctgcccttttgttttcagaccctcagcagatcgggtgattcctgcccatgttgaggagggtgatttactttactgagtgcaccaattccgatgctaatctcatccagaagcaccctcacaaagacactcagaaacaatgtttaatctgggcaccttgcggcccaatcaagttggcacagaaaattaattaccacagaaatatttctggattcaatggattaagttggtaatatagtattcatattcatttccacgtgcctaaaaagaaggtttttatcctttttaatatcctcagtcctattaaacatacctcacattcatgttccatggttattctcttattatgttgctaagtgcatttctacttaggccaatctgattatagtgattcagattatagtgtttatcttctttcctttatacagtagacagtgttcgcaaaccataggagctgaaaaaatttccttcttatatagtaagttttatgattccagttttccaaaggggtgcttatgttatggttataacagttacagccagatgactatcttcatcagcaggtataaccccaaatatttatacattttcatttgtttcaaacataaaatatggtttgcctaaacatgtcattctgccagattggactatgcaaaagaatgttactgttttattttctgcttttactttaacttgttctcatttgagctctaccagttaagatgagaagatgactaaagctagggaagcacattttaaatgctaaataccatgttcatttcaagttgggaacttgaaatgcaagtatttttaacttaatcattaagttaaagtcagtaagaacgtggtatttagcatttattcattttaacttaatgattaagttaaaaatacttgcatattggtttgcttgaagctatggagaaaaacatttaccttttttccaaaaaggtcttaatattcaaaattattgtttcaatcttacaaattaacaatttacttatttttgatactttcggccttttttatgtgggctacacctaacattttttgaaaaatacatactgcttttcctgtaggttgcactttgtgatcctgtgtgtaattcattttcagtggttctattttatttattttttgttagtttgtattttcttttgtttctttttctcaatttttaaaattttaaaacttgtccttttcttttttttctttattattgcactcttctaccaaaacattttcagtggctttgaataaaagtatcagaactttcccgtggttagcattagctctgagatttgaacaggatgtattaagcagaggaggagggaaggccactaacatgtatgagctccactgtgtgtcaccctctctgccggatgacttacatgtggtatggtatctcattttcccagctctcctatcatgtcctgcggcatgttatcaccacttgataaaaaaattgaaacatggagtgcttaagtttcctgccccaggtcacagctgatctgaaaaagaaatgggattcaaatccaaatgtgcttaattgcaaatccccacatgactctttccttccttccttccttcccccgttgctgccaatgtaagaaggaacaccactccctcatttgctacagagaagacaggggcagctgtgtaaaggcaccaggaatatgccctgcctccttccttccacttgaaagcaacatctggatagacactcaactgcttttattttttgaaaaatgattattaatcaggattgaagtggagggaaaaaatcaaaacgaatgtttctttttaaaatgaaagatactgtttaattatttaacagccttccggttttagttaatatctttgaagactttggattaagattccagacattttcttgaaggatgtagaaaacgtatttaacttcaagtttagtttcaaaatgacttagctatcaattcttctcattgaagtcctctttgagatattatatcccaaatgtaatacacaggtaataattcaataggaatacttggaacattggtgatatttgaataaccttttgaatgaaacaattgatttgatctcaaaagatagtgaaaacgtctcattttgttttttatgttaaatatgcttcctcttaagtcaaaattcttttttctttttgcttttaagctcataaatactctgaattctcactaatcttttggaaaattgcttgtataggtattataattcacttggctcatgagttacataatatagcagtatatgttgcaattcaaatattgcttagcagtattagttgaattcaaaatagaaatcactttctttttgacaactagcataatgaattcattgactattgtcaaatttatgaagacagaaaagtccttttgtgattcaaaaatgtgtttattgatgtttatatatcttttgtcgtgtttccatactgtctcatgaaggttgtcttcgtaattcagttatctaaatacatcatacatttaccttttccctggggtgccgttattctacaacaggctaattacagatatctgtggtttctgcaggagtcttagtgtatgatattgatgatatcatcatttactttcaaaattgcaaaatagtaatttaggaaagcatggggatttggaaaaacatgtcttcagcaccaactgtttttgctctttgcatgcttgtttcgtaaagaactctaatgctataattgcaaaatggaccattttaaagatttttccttcattctgtacttgggagtggtgaaagacatccttactgtgctgcacagtgtctcatggtgttctcttaaacagcattaacgtcttgtatgcgctgctttactaaattctctgttctgagaaataactgaaaatacggctttctattaaacgagtggattattctgttgttgttggcttttttttctcaaacctccttctcttctactttatagttcctacaacagcagccagtacccctgatgccgttgacaagtatctcgagacacctggggatgagaatgaacatgcccatttccagaaagccaaagagaggcttgaggccaagcaccgagagagaatgtcccaggtaagtctggctcttccatcattcagccctacgatattgggaaacctgagcttgcctctgcctcagtctccccacaggcctgctggctttatcaagatctttaaagatgtaaagttctaattttaaatgtttactgtgtgggcacagtttgtgggttttttgcatcctccgtgaacatgctgcctaggaaggatccaggtatagttggattttgtaagcacaaattaaatgatgtctgtaacattctctctggcgaagaaaggtacttggcattattattctgtgtatatgtagtacctgtaatcaacatgttgtaaattaaaatccatcaaaatgctctttagtaaagatgaggttttgtattaaatcccagactgttataattgtgaacctacgattgtttacagtctgtaaaatcatagagacttaaaactgagctgaaccatagtgattatttcatctagtctcctaagtgatacatagtggaatagaggttcgagagagtggcttcccattttagcacaaagcaaaatcagtgagccagagacaacatttagaatccaggcctttcttgctcctagtacagtactcctttcattatactttgctgaaaaaaaaaaaaaaaaaaaaaacctgttttggtttggtttgtttttttttagcaggtccttaattaagcaaattaaaaaataacttatgtctaaaacatggctaatccatatatactatcaactacaattgaagctatgtctgctaccaggcactggatgttgtattggagtttgataatatggaggattttagcccttgctcagattcctcattcattcattcattcaatcaacaaatatggacttattattttccagtcacttttctgatttgtagtctacaaacctaggagtgaatgtggggggaaaagaagtaggacataaaagtgaatgaataaagatctcaggttaaagtaagccattcatttttagtgttaatattctgtggcaaatatcagaagataggagaaatttttgtcttagcacagatgcttaatctcttgagagacattaaatgcaatttatgaattagactgctgcgtattttctaagatcacagtcagtctttagtagacaattaatctttcctgtaatttctgatctgggtccctgctgaccccaggaagattcctccctcccagggccaaatgaatggcccctgagcatgtctttcccatgcaaaccagtcaatcaaaagctccttactcccaaccaccttcttatactctgggccactattcacctgctctaatcaccccaggaccaggtaccagaccactagggacaacctcatgccccatcaccattatttgaactaatcagtcctaaacccgcctaccctgcttcgctcattctttccatgaaaaccacaataaaaggctcttgctcatgttttcccctcctgaccaaccctggtgcttcccatatgaccctgcatgtagtggcatgtaccggcttcttgggagctgagtaacaaactgtcttttccatgataatcatctcctgacctcttggcctcacctgaataataagaaaatctacccttgaaaacataaaactaatagtttatctagaaaggtacaacacaggtactgttttttgtttgtttgttttgttttttgtttgtttgttttgccttaagatgaataacaatacttggatctactttggtataataacataaagaggaaaaaagccttataatcacagtacttttggctctggaatataatgtgcagttctagtggctgcccacgatgaaaacctaacagctaattgaactagaaagctagccacagggaattattaagttttcacctgatgccaagaaaatcagatctttccttaggaaagacacaggcactgttcggaaagcattggaggactatgaatcatacttattgccactgaaatgtcctcatttgaatttacatcctatctcccttctttatgaagctttcagaggcttcctgtgccctcacaaatccacttctgggcacatgaagtcgtaaaaaaagaacaatgacaaaaataaacaccgaatgctcagcttgtcattttcagcgcctaccactgtaccctgactctggtcttcctaccacctcttccttctcaactgctacccttgctttctgtacagcgttaagctgctgttctgatcaggccactctgctcatcgtctgttcatctcatcttgggcttccctttgcccttggcattgagttcttctggaaatgccctcccactcttcttcacgctgacacatctcacccattccttacaccccacttcatactcagaatgagacaggcagtcattgctcttacctttcatttaattctaaatatttgctccccggttttgttagtgatttctggacacacctgcattatctttccaagctggatagaaaccttgagacctcaagtcatgaagcctgctacctgcattcatcgtggacccactgtagcattttttttaatgtgtgtttttttaatcctggattttttctcctagtatatcttgttcatttttgaccttattaagaaaacttatttcaaattctctgttagttttagatgtgacaggtcttctttaaaataataatttaacttttagcacatctgtgtaacttgtgacttagttcatgattttgtagattttgttcatcttttagtcatcagatatatctgatataacctaagagatgttgtcccagagcagagaatgttgtctactagattccagtggtcataggaatgtgagacacctgaaatcaatatgtatcttcatagtctgtggtgctgaaatctagggacttttcaactttaaacttgcctgcctcttaaatctctacttagtagtagtcattttctctgcatgaaacagccaagtctttgaagattgataaatccaaatgaaattgatacctttgtgcctgcagtggaaaattgctttataagaatccatagagccactgcaagggccaggtcctgagaattttaaattttaaaaattgtgcggttttttaaattaagttttattgtagtttttgttatatgttttcttacaaatacagaggattttggaattttttcatattttggtttgttgttgccattgtggagtataactctaaacctgtagatttttgttgctaaacctgtagatttttgttgctatatgtcgtgactagcatctagtcaaatagaaatctacagctgaaccatgtgtgagcacttttattacttataaacttactacttttagtatatgcttaaaatgaagtccttcaaattgaaagctgacccaactcataggtttttatttcttttcttttttggagatggagtcttgctctgtcacccagctggagtgcagtggcacaatctagactcactgcaacctccaactccctggttcaagcgattctcctgcctcagcctccccagtaactgggattacaggcacgtgccaccacgccgagctaatttttgtatttttagtagagacagggtttcaccatgttggccaggatggtctcgatctcctgaccttgtgatccacccgcctgggcctcccaaagtgctgggattataggcatgagccactgtgcctggcctaggtttttatttttaagataagcagcaacattttaagagcgcccctttctcctgtcactaaatataaataaacttagctcacctaatgaattttttattttataataaaaaattgggtaccacagggtacaaaaacatgatctttagagccacagagatcttggtttatattcttccctctcccttttttacctgcatagcctcgagctggtaccttaacctggttcgtaaaatgggatggccctggctaatctcacaagctgttgtgaggaatcaattaaattagatagattttgtaaagctcttaatacagggtcagcagtaatgctacttgttatcagtcccacagtgaaattcactgttcacagggagatggtcagcctacatatagtgtgtattcatttgcagtagagtcttagtgggatggtgcaggtgatttgtttatttgtgggggtataggatattgttaaattgttctgaaaatcaaaatgtgagttaatttctatagtaatgcttatttgcaactcattagctaaataaatctctttaattatttcatggattcccccagcttaaagcttaaagtccagtttcttaaagtgtatgaggtaaaatggaaaaaatgtaaatgtaatatgggaaatcagttctcacattgcagtagaacattgaacttctatctcaaactaattttgagattccttgcttgaagaattgttggtagagtaccaccactgtgaacattcccaaagcaggaaattgaaatatttatattgcaaggcttatctcatctataaagcaaagatggtcttccatttcccccttgcccacaggttccctttattaacttggtagaagcaccaaagcagatgggacaatatgtttcttttcttccatgttctattcttgttcattgcagcagggcatttgtcccaattttgctgtgaaccttgagattatttttgatatgcttttcaagtgtaatgaaatatttattccatcttgtttcctccatggttttacaaaaacaacaagaagaagctaattgcctatcatatacaaagaatgaatgccaatggacaataaaatctgtaattaggaacccacatggtgatttgatatagtattgtctcatagaagtcttctatctatagttatttattccaagcctctttttctttcccatcttgaagtatgttagaagagtctattccttaaggctaagtacctacaaaaaacaggctcttataatacagtaatcaagttttctcatgctttgggagtacacagagtatgcaagtacacatctggcaccaaaccaatattttgtttccttgatctttcttcattttacctagttcagagttgcacttcaaacaaattctacttgtcatacacttgaaaaggcagctgtaggtggtaggaagttaatattttctttgaacaacatacagaggtgcagacttttactttttgtatcaggttaatgagtgaacttctctcagggaaatccaggtgaacatcaaagttgagagcaggaagcattgatttcctacaaaacacattcacctgatatcttagtcagtttgtgttgctataatagaataccccagcctggataatctgtaaagaaaaagaagtttaaaattcggctctcagttttgcaggtggggaagtccaagaacatggtgctggcatctgttgaggacttccttgctgtatcatatatggtggaaggaagaagggcaagaggagggcaaaactgagttttataacaacccacttctcacaataacaaacccactccccccataatgatactaatttactcatgaggacagagactgaatcacctcttacaggacttacccctcaacattgttgcactggggattaagtttccaacacatgctttttaggggttacattcaaaccatagcagttggttactaaattagtgctacttgtaaaaaaatacatgtttgctgcattcagaatattacatgttttcttggagtttttggaaggacttagcgtaatccttgctgttcatgacttaggttggcaagctcaaagggccttaattccccatcagttctttaaagggggataggtcttaggatattagacagcagaagtcttctttttcttcccccattatgtactgctttttggcattgtattcatgacacacacacacataaaatgtcatattttctttaaagtcaaaatatacagtttaaaatggtttcagttgctttcataagagagtaaaacttaggtgttcagtttaatattggaagaccttgttcagttaatgtgtgccttccatgaatagttggtatttgttcacatcaaatcaaatgactgtcagttctcggggtaaaaaaagaccaaccttgactcaaaaagctatattcctgcaataaatatgaacatttatgtttaatatactgctgtgattaattatttatatcctagtgggaggtcaaatattcttcagataggaaggggtatgtaataaattttttaaatatctaaaatgacaaaaatagaggaaaaacataatcatccatcctattaagtctgtattcaaaggatgaactgatgattttaaattcaaatgtttccttaatttataggtcatgagagaatgggaagaggcagaacgtcaagcaaagaacttgcctaaagctgataagaaggcagttatccaggtaaaacctgaacccatttcctaccaaacatcacatgccagcagtctttttaatgagtgtctgcaggtttacctttatctgccagcacctcacgtgtgattgttcatagtcccatgaacttcagctgttcttaatcattgtctagtaattgagttgtttaaatcctgccttatatttgctcccaattatttcaagttataattcattgccataaaactcacattgtaacttgcaatctactttttattaataatacatcttttcagtcaccacaatcttctgctgcttctccctccagcaaaaattatgagaatttgaatttttgatggaaaccagtctcaaaattaccttaagtaaaccaacagtttattatggtcaattacttgaggtactgttagtaagagagggatttttttttaatatgtaatataagagtttcaagagtgcatatatttatccaaagttattagtcaaatcagccttcagagagcctatgaaatactgattttcaatgagaaagtaggtttgatgagggttggagagtgcaagaaagtgaagtaagctataaaacgtagaattagtcaatgttggaatgactatgcagtctttaggatactttttagcactagaagaaaatggaataggatgtcttttttagaagacttgaaattgctgcttcatcctacttattcagtccccatggacatatgtgtttatgatggcagcatttccaggagaaagtggaatctttggaacaggaagcagccaacgagagacagcagctggtggagacacacatggccagagtggaagccatgctcaatgaccgccgccgcctggccctggagaactacatcaccgctctgcaggctgttcctcctcgggtaggtctcgctgcagccgagttcacacttcaggtcacagcacagacagtaagggtggggcactgggaactggaagccatacaaaaagaatgaggagaaatgccttgagcactgttattcagaggttcaacccctgtccattccatcttgaaggtcaaagggtcacagggcagctacctccacaaggtcatctctacacagcaggtactcacacttccccacagagcagccagacaggactcccagggactcacattgcaagccctgacttgatttaatattcctgaggtggtgacaattgatggcatagttcaagttcgaacacaaaagctggaaggatgtcttccagtcccttcaggctgctgtaacagaataccatagactgggtaccttatcagcaacagaagtttatttctcacagttgcagaggctgagaagtccaagatcaagacatcagcatacttggttgtctggtgaaagtttgcttcctggttcatagaacttaaattttgtttatcttttatttattttatttttgtttttgtttgtattttgctgtatcctcatatggtggaatgggcaagagagctctctgggccctcttttataagggtactaatgtcaatcttgaaggctctgccctcatgcctaattgtctcccaaagctttcaccctcaaatagcatcacactgtggcttaggtttcaacatatgaattgggggtgggagagacacaaacattcagaccatggcaaaggattttagaagtaaccttgcccagccccctcatcatgtaagtataataatataactaaggtcaaggaaagttgagatttggctgagttgtaagaatttttagtggaccagaaagaattagaactcaaatttccatctcagagcagtggccatattctctgtggggaagcatttgtcagtcatgacattagcaatgatgagacttattcatggttttcagtgatcattgccccaaaaaggcatgttgagtggtacaggcatagatgtgttcaccggcattctgtgggagagcttacttggaatggaaggaactttctgagcatgagtgtgtaacttatgtccacttgttctttttttttttttttttttttaaatgagatggagtctcactctgtcacccaggctggagtgcagtggtgcaatctcagctcactgcaacttctgtctcctgggtttaagcaattctcatgcctcagcctcccaagtacctaggattacaggtgagccacgacacccagctaatttttgtattttagtagagacagggtttcaacatgttggccaggctgatctcgaactcctgacctcaggtgatccacccacctcggcctcccacagtgctgggattacaggcgtgaaccaccatgcccagccatttgttctttctgtttgtcattgagcaagggatattgaaagctctgcctgtgattgtggaccgggccatttttctaaacagtgctatcagtttttattttgtatagtttgaggctgtgtttttaggcgtgtaaatgttccaggctgttaggccctccttgagcctcttcttatgaaatgatctttttatcctttgtaatgttttgctccaaaatctactttaatattaataaagctattccagctttcttttgattaatattaatgtggtgcatttttccatccttatactcttattgaccttgtttgtctttatatttgaagtgtattttttgtaggcagcatgtaattgggtcttgcgttttcctttggattgggaagaccatgtacactgaatgaggttatggatatggttgtcactgaatctgtcatcttgatatttgtttgctatttgtccagtctgttccttgttcttcttttttcctcttttttttttggattaattagaaattttttatgattctattttatctcttttgttggtttgtaagttacaactagtttgttattttactggtttatctcctttgtgggtttataagttataactagtttgttattttactggttgctttaggcttatagaaaacattctaaacttgtcacgatgatgttatgtcagttcaaatgatattataccactccacagacagtactttacaaaagtacttccatttttcatctctctctctctctgtaagcggttgttgtcatactttttccttactacattgttgatgtttttctttaaacagttattttttaatgagttgtaaatttaaaaaaaaaacaacatgtttacccatgaagtcatcattttgggtgctgtaaactctttgcgcagatccagctggtatcattttccttctgcctgagagatttcctttaaaatgtcttagagactgggcttggtggcttgtacctgcaatcccagcaactcaggaggttgagataggagatcacttgaacccaggagttcgagactgcagtgagctgtgattgcatgactgtactcccatctgggtgacaaagggcatcctgtctctttaaaaaaaaaagtttgagtgcacataagttggtgatgaaatctttgtttggctttgaccaaaaatgtcccttttatacctttggttttgaaaaatatttttgctgggtaaaaaatactggattgaggtttctctttcactgcctgaaagatgatactctgctgtcttatttgtgttgatatctttatctttatttctctaaaaataacatgtcttttttttctgtttttacagttttctctatatcactggtttttaacaatttaattttgatatgccatggtatcattcagtctgcccttaattccatctggccgtttttcatcttatcacctcacatactgtagttgttgtatatagaaatttaacctgggctacccccaacacccataatatcgtctgtatcttaacttttgaacctatggaatacagttattatatgaaaactgtttaaatatccatgtttgctaattctaacatctctgtcaactttgaatcaattttgattgcttattattacatgtggcatttccctgtatcattttatgcctcataattttttattaaatgtcggacgctgaatttaaacctgttgaatgctaggtgtttttgtaatattcttgagcttttttctgtcacatagttgagttacttggaaacagtttgatccttttgagctttgcatttttagatttgttaggtgggatagaagcagttatcagcctaggactagttattccttactagtgaggcaagacccttctcagtcatctaccatgaatgttaagttttctcacctgactcgtgggaagaggcattattcctgtccctgtgtgaacaccaagcactgttaatgctaattctttttggtgattttccccctggcttcagtttctttcacatgcatgtacccatcattactcagctatattctcagggatcactctgcacatctctggattctcttttggagcaactctctcctcaccaataccctgtcctgtgaattacaactaccttgatctctccacacacttcatgtcctccactccacgagtcctctaggctctgtgtgggtttccccacctgaaaccatgacctggaaattcagggccatgagtttggcagctgtaagtcctcatttgtttccccttttcaggaatcagtgtccttcacctgatgtctaatgtcttgcagaaatgttgtttatgccaggtgtggtggctcacgcctgtaatcccagcactttgggaggccaaggcgggcggatcacgaggtcaagagatcaagaccatcctggccaacatggtgaaccccgtctctactaaaaatacaaaaaattagccaggtgtggtggcgcacacctgtagtcccagctactcaggaggctgaggcaggagaatcacctgaacctgggaggcagaggttgcagtgagccgagattgtgccactgcactccagtgtggtgacagagcaagactccatctcaaaaaaaaaaaagaaacgctgtttgtatatgaatatattgtccagttattggtggttcaggcaggagggtaaatccagttcttctcactcaatcttggctggaattgtttgtgcattttatgcaacttaaccagaaagtcacccatttgcaccgattttcctcaccattttgatttttctttctatggataaagttacagtgcacagaaagccatgaggagccgttaaagagctcgtggcattcttccaagacgtaagatactatttaccctgttctaccgatgatatcactgcaacctcgggagatggagcggctggttcagggtgacactgctgggaagggagagggtagagccgcgagtcactgtggtgccttctcactagaacgagcttcctctctaaacaaagagcttttgaaaaagaatattcatattagcgttttcattttctatttgccaaaattctctatcttagcaaggcacttgtcaggaaatttttttttatatctctgcagaacaaaagttccttggttcctctcttttttggagaacacgctttcaggagaggagccgtgtgatcatttgccagagaaggataggctggtgggtgctgagaccagaatctttatagcagaaacttgtgaagcgttccagctgaaagtccaatctctaaagtaagatctttgctaaatggacattgatgggactaaaaataagctgagggctgaatggaggctttaacaaatgtacatttaaactctcagtttagtctcatcagccatcacaggaaaggcagtggcaagaatgtttgccgaagtgtcatcttttatcaaaggggataattttagagtggttgtaatcgtgcttattgtgggcctccgcattgcttcatatggaattaggcaacatgttcatttgaaaaaaaaattaaaaactggattaggaagaaatattttactgtcaaaaatcagatcactgttgttgattgatctaaggattcctgttaaattcttaactcggatttatttatttatttatttattttctctctctctctctctttctctgtttctctttctctcctgccttccttccttccctccctccctccttccttcttcccttcctttcctttcctttccttttctcttcccctcccctcttctcttctctaatcttctcttttcttttctcttttcttttcttttcttttgttttcttttcttttcttttcagggtcttgctctttcacccaggctggcatgcagtggtccagtcgtagctcactgcagccccaacctcctgggctcaagcaatccttttgcctcagcctcatgagagttgggtctacagaagctccaccatgtgtggctaatttttaaaaaatttttgtaaagacagggtctcgctgtgttacccaggctagtcttgaacttctggcctcaagcgatcctttcacctcggctttttaaagtgctgatattacaggcatgagccaccatgactcacctttaaatctttcctttgtaataaaatgtggctgggtggtcacaggcctggagtctagggggcattacttgccatttttgttaagttaccatctttaggtgttcatttaagttttaatgttgtatggcttgacctggcacttaggtctgcactttggcaggcacaagaaaattgtaaataccttcttttttttttttttttttttttttttgagacagagtcttgctttgtcgcccaggctggagtgcagtggcgtgatcttggctcactgcaagctccgccttctgggttcacaccattctccagcctcagcctctcaagtagctgggactacaggcacccgccaccatgcctggctaatgtttttttttttttgtatttttagtagagacgggctttcaccgtgttagccaggttggtctggatctcctgacctcgtgatccgccagcctccgcctcccaaagtgctgagattgcaggcgtaattaaatgccttcttgaggacttttataccttcctcttgaagacataaatccagagcttactggtggttgtctgaaaaagatcacatcttgtaataggagtcatacataaatatttctgagatctccctcatacttaaccaccgtgcctggaaaatgcagacaactgtattcagtaaatggtatttgaatataagtaaatcaaaagtgtcgtttccatagattctgtagatgttaccacttagaataattacctgtctaacccttaacaaattctaccgtatattctcagactttgcaaacacgggattccaaaacaatgtggattgttttcagtttctttgaagctcagatttaaatcatacttttactcagtttttaaacctaaacgtggaagtgttatgagatgttgtttttgtgcagctagaattccttgttctactaatgaatttcatttcctgagtccctgtgtctgagtatactgtatgtttcaaatttctgatttagttatgtacctataggcaaatacactgaatggtcaacctaaaaatgcattgtttgactcatatttagagtcatacatatataggcacatgtatttaaaataaatactttaggctagatgtggtggctcacagctgtaatcccagcattttgggaggctgaggtgggaggatcccttgagcccaggaatttgagaccaccctaggcaacatagaaaggccctatctctacaaaaaaaaaaaaaaaaaaagatttttttaattagccaggcatgatggtgcgcgcctgtagtcgcagctactctggaggctgaggtgtgagtgtgaaccaggaagtcaaggctgcagtgagctgtgatggtgccactgcactccagcctggatgacaaagcaagacgctgttccaaaattaaaagttaaaaaatgagataaatacttgaaatattacaattattaaaatagttgttttccccatgggaaaaaaaagttgagcagagctgtgtctttgcactcagaaaaaactcttactctgttgaaggctagtgactcttctaaacaccaaccccttcacctttttactttccttagactttctttggaaaatcaaggagttagcactttttccccctggaagaattaaatgcctctccagaactgcagcacaggaggttaacttctaccacctttggaggcctgcaagctaccagattaaatacttaaagctaagcattcatcatttcttaacctgccctctacagtcatgcacttcctgctttttactttgtcagggctcgtactcaaactattcatagcttcatgaaacaggaactaaatgctgtctgagcctttccccttgtaactctcagcgttctgcttatccttcatagacagaagatgatgatatgtcctgactgttgaagagaaattagacttaatgtgatcctgtacagttaaaccaaaggccagatagggattttttatttcaatcaactttctattgtaggcctaggtttggaaaaccttagcaccccctaatttgtaagacttgaactgttttaaagataagggatacacagccaaagctttctttgtaattctgagatttttggtgtttttacagatacttagtctaaatctttcatcagacagttatcatgattattattctgacttcaacaactgcattttctaaagggaagtgagaattaggaaacattttcctgtacatctgtttatctatcccagttgtgttgtttggattttttcagtgtcttaacgattgaaaccatcttatccatactgaaattcatttcatgcttctatctgctgcttcacattcaggctatcagtttaattgagcaaaaaaaaaatgttggcagtttctatagcatcggcatccttctttggtttctcatttttgaatggttcagccacatgttaaattttgctgagatctctggaaacttcttcacataattctttgatagaacatgaattctgtgagactcttcattaaagagcacggtttcatcactaagttgagattttgctcaaggctatttggtaaattccagcagaagagcaataaatgttcaacaagaaacagccgtcattggagataacaagggtagacattaatgggaggtttgtcacaggtaaacaggtgatggcatgagaaggtttaaaccacctcataaataaatttttcgccactatatgatgtggattacaactaaaccaaactttaaccaatgtgggtgttggtgtacctttcttttctaaagcaaaaaagaaattgtggtactaaacttgagcttttatatgataccgctaattgcccttcacccaacaaaccaattatttctacccatcacttttcgttgcaaaagaaattatcttataaaatatatgtatatagcatatatctccaaagcaaatatgggacatctgtacctcaatgtaactgatagtaagttaaaaattatttgctgagttcttggtatgtggacagatgaatattataatgtttaaggcattccaccagcaggttttgaatttaaccaaaattttatgaagctaatcagaatggaattaaaagttgaaagactgccaggccaaaaagatcatctttcagaaaagtaaataattgctctatacttacatatttattatttatttgttcaccatccgtttatttttagttgagttctgtatacattggtgagcaaagggggactcattagcttgggcactcctaagggcaaacccaataacagatagtgaatgggaaggaaaatgagagaattagcatttagtgaacaaaatcttataaactatgctgaatggtatacatgctctttcagtaaagccactcagtactattacttccctaccttctgaatgtttaccaagttcgataaaatcttgctacatacaaatgggaagtatgtaacaagagatactagtggtttctgggtttaattaagttacatagaacattaagaagtatgttgggaaggcattagcttaaaagctgtcttttgccactgaggccatattcatcacccagattccctccacagtggagcactgctcagtcactgccttcagaatgcaaataggtcttcacaggatgctattaaaacccatagcaccgtatggttttacgctctgctttcttccagcaaacctacgtattttaatgttaatatatatgttcattttatctttgagaatgaaaatgtattatgaaaatataaatatttagtttttgtagacaaatagcacatttaaagatccagtagttattcacctgcctggtatgactgatagagaacagatgggtagcaaagaatcctcaccctggaaacatgtacgcatacacacgcaaacacaatctcgcataagctttaaggggttcattcattttgtgaaggttgaccatggataccagtttaaagatgccaggtgatgtttggcttttaagtatcatcaccttgagtttccttatataaatgttttaatatcaacaaaaaactcagaatttctaataggtcataacactgcctaggtatgggaagaggagagggtaaaattaaaagaaatgcaaatgtacttttctttgaataggctaaccagttagaggatgtatgaagcaggaccaccatagtccaagtatgaatatgcaaaattaaagcagattgctgtaaatctctcttaaaaagtcaagaatatgtcacagttggcatttttcggatgatcagaccgtttgacaaatctctgcaagggtccgagttagtcgaacatatcttttgcttatgatttcagcaacactgtgcgctttgccttctgggttgtattactaattctgttcatcattaagtgtacacatgtttcactgtttgactaaacaaagcttgaagacatacaagtccaaacattttctgtcctttctgtattcccaggtcagaagatcttagctctttatccattctgtgctagagtttgtctgaaagcatgaatcatggggttgtgttgggtgctaaatttcagttctatatgctgccttcactaatttatgactgtggtctgaacaaccaaaataaattatttctgagaactagcaaaataccctggaaaaaatttatgaaacctaccagatttgtaaaaaggtcagccaggcgtggtggctcatgcctgtaatcccagcactttgggaggccaaggcgggtggatcacctgaggtcgggagttcaagaccagccggaccaacatggagaaaccctgtctctactaaaaatacaaaattagctgggcatggtggcgcatgcctgtaatcccagctactcgggaggctgaggcaggagaatcgcttgaacccgggttgcagtgaggggagatcaccccattgtactccagcctgtataacaagagtgaaactccgtctcagaaaaaaaaaaaaaaaaaagaaaagaaaaaaggtcactaagtgatgagagaattaaaaccactcctattttctaccttttataacataaactcttgtctttacttcccaggtttgccatctttataacctgtaactaggagcaagtgatttaataaagggattcctcctattccgtctgcaaattggagttaatttttctcctctttctgcaatttctgttgttttagcttttgttagccataattagaaaatcaaaaggattcattgaaagttgagacaaaattgtgaagtaggaagatgtcttcctccgtaagaggagaaagattgttagaggaagtacatggaggctttggtgacacatccctatgaggaagtgatctgcttccacgggaaggagagaacagatgatagatgactcctagatgctcctgcgtcatgttcagtacaaaatcagagccgcatcagcaaaccggataccctgggaaggaacattgggataactccttggccataaacaaaagttttgctctggccttatgaactaagtggattaatagagattagttgttcaatatccttccatctaatggatccatattgttaaaacttaagaaacaccaaagggggagagtgtgagaatctactgccattttctccattgcttcattcaagacttctgtgtccaccttggcatgggattatcatttgcccttttatactcaccttaaactacaaagatcatttgtttgcctttctgaagaaaggaaggtggataaattttgcaggagactttaaaaattcagctcaactcctggcattaaagacaataaaggtggtgattcagaggtccccatggcagtttccccaaatattacgtttaactaagatcatctcaagcacagagagacttaactctctaaagtgtgatttttaaacctgcacacggaaattttctacattttatatgctcaagatttcttgaaatccagggtgtaaaactgtgaaaataatagttctgaacctatttatgaaagcaggagagaattgctttgttcagttttggaaaccaccagggtgcaatttaatgctccaggagagggttttctgtgacctggaaaggttggggtgattcccgtacagtgagtcatttacttccttcttggcaggattatgcccagggcttttaaacgctcttgacacttcactgccttccataagaaacgggtttagggcacaagtgtctattatgataagatgccagatttctagatcaagcataaagctgtggagtgggacaataggacttaataattttaatacacttcccacgtgaactgtcaagtaataagctacatattcagacgtgactggcattgagtcatcctgccattagtcaaatgtatgagacttttcccaagtcccagcaacaccaaatttgagaaatcgtataaaagaaaaatgaaaaagtaaatacgtctaagaaatggggaaatcaataaaaaatgtactagcaccaggggcggtggctcacgcctgtaatcccagcactttgggaggccgaggcaggtggatcacctgaggtcaggagtttgagaccagcctatccaacatagtgaaacccttctctactaaaaatacaaaaattaggtcggtgtgagggtgcacgcctgtaatcccagctgaactcaagaggctggggcaagagaattgcttgaacccaggaggtggaggttgcagtgagttgaggtggaggtgcaccactgcactccagcctgggcgacagagtgagactccatctccaaaaccgtgttagcttttatcaggaaaggccattaaattttcttcaatattacctacatcaatttgacatcaaactataagaacacaatatgtgagatgttttgaaattaatgaaatgaatcttctctttgagacgagtttgtgcacgctatgaagtccattaaatattttctgggaagagttcccagttaaaactactttctaaagtacccaagcacactatatagatacatcaagtaggtttattaatgtcagtatttcggtgaaaattgggaaggccactattctgagtagagaggtgtttgttttctacttgaagactatgaaggatattctgcactactgggcctatttctgaaattgtatctagctgcaagttactcattaatttaattaacaaatatttattagcaaccaaattgtggcaggaactgtgcctagaggtagaaatacattacgctcttgtttccagagaggaaaatgagtaatgttctaaaatgtaaatcttatgtttctctttcctcttgctgtaaatgatgtctaagccatttcggtggtgcctgttcttaatcctttaataaattattttgaatgattttttaaaaggcagtgtgattgtgaggtgagtttagtacaaattaaaaaatgtcacatcagttgcaaacagacagcacataattatgagctaaacactgtttcagaaacagtagtgacaataaataggattcggtataattagtcctcctgggacagatctcttcctctgttctttgccatatattttaataatgagattagccatctaatgccaatataaccagactgtagtattaatacacagaaaaattattgctagtaacagaagatttaaagacatgagggtgatccggattatatgcctgcaggttaaaaaaaaaaaatgtttcttaaactctctttatcaatatccttttcgtgagccactgaattcttttgtttttctgatcatatgaataacccgtcttaagtatgaatattgtgacaatagtaatagcaattactttaagagaatatgtttctatagagataacagaggggtttttccctaccattcctgtatgaaggtttctgtgtttttaattaaaattttaagaaattcatctttgtcttagcataataaaataaacctcactagacaatcaggacaccttgttattcttagatacattattatagctcaagaaataacaaatgttaagcctggaggatttgtattttggccaaaagttgtgagggcaattatttatttatttgagtgaaatatgcaggaatcatatatcaaaaggagggaggtcttttttttaacctcaacaaaaatataaaagtatagggaactgttatctatgtgaacccagcaaatctgagacaggtctcagttaatttagaaagtttattttgccctggttgaggatgcacctgtgacacggcctcaggaagtcctgatgacatgtgcccaaagtggttggggcacagcttagtgttatgcatttttagggagacatgaggcatcagtcaatacatataagaagtacattggtttggtctggaaaggcgagacagcttgaaacaaaaagcaggaagactcgaagtggggaggggccttctaggtcagagataggtgagatgaacagttgcattcttttgagtttctgattagcctctccagggtagacaatcagggtgattggctctaagcagttcccagctagacttttccctttagcttagtgatttgggggccccaagaattattttctttttacacctgtgttttttctttcttaactaaaaatagtatttgtttctgagggatagagataactaccattttatttggtatgatttatttgcctaccgtccaacaaagaaggtaatctgattttgttttcatttccaagcatgattcctagagatgtgtttaggtggccaaatcaatgaagcagaaccctgcaaattcatttattgggagatatcctaaggtcttcctgaattatctgatgttcccaggctttgcttatccaataggcattaggaagaaaaggcttgtgtttatgtagatgcacacaaaatgcgcatctcagcttacataaacagtgaaggggtttcccaggtctcattatccctggaggagctgaggcctggggagtcctcagagcctcctttgctactctgttattgtggcaggccaaatctcactaatgcaggcctccgtaacagctgtttccgtactgactgagtggttcagttaaatactaaaagctaaaaaaaagccagcgcccttatacagaggctggaatgtaacaaaagcccaccaagagttttgcctaggcctttcctggcaaaaccaaggaattcttaacaggacccatttaggattaacaagttttactgggagtctgaagaaactctacaggcctccaagaacaagtttactggaggtctgcaggaactcctcaaacctccctgatttagcaggagacaagataagagtaatcaccccagcacctagacccatttagattaagtaaatttactgagactccagaggaaggtcttcaggactcagaccttagttatggattaaagaagttaatcacttctgtcatgagatgaatgcacacttacacgtagacatacagcttagaaggcatataagttctggaaactttgtaattttgagttggtctggcactaatttccaggccatctccctgtaaaaggttacaaaaataaaaactctcttcctcccagttcatctgcatctcgttattgggctgtgaggtatagtagcccaaccctcagttcagtccgggaacattattatcaaactctggggattttcaggataagttaggaatatattttgaaggagaatggcagtattaaatgagatcagcaattgaaaacatgtgaatacattcaccatttaattacccatctcaatagaagataaggatgaatttagcactagaaaccatgaatgtcacaaaagcctaactttaataccttgaatcactttccagtaatcctaatcctttatccacatggatagaggacattcctatcttgctctttcttctccccacacattagcttaataattagctaaataatttcatgcattagctaaggaataatggaactccagaaacctaggacagtaattgagagactgaacaagctaaatctgaaccttctgcacaattaaaggagctgatgttagcatggcccacagaatattacctgcacttgtaaaaactagaaagtcaggcaagtactcctggaacagactgtcttttctaaccatgcacttatttctttgtttttaactttgtttttgtttgtttgtttttgagacggagtctcgtcctgtcgcccaggctgtagtgcagtggtggaatctcaggtcactgcaagctccgcctcccaggttcaaacaattctcctgcctcagcctcccgagtagctgggactacaggcgcccaccaccatgccttgctaatttttgtatttttagtagagatggggtttcaccatgttggccaggctggtctggaactcctgacctcgtgacctgcccgcctcggcctcccaaagtgctgggattacaggcgtgagccacggcgcctggcctgtttttaacttcgtaagttgctttgtagaactatcttaaacttggtctattttagattctccttgaagggccagatcacaaagtgattaggagaaggaggctctggagccaagacagtgagactaacccattcttcaaatctaacactaactagctgtgtaaccattgggccagggatgtagcctatgtaaccacaatctcctttgtgcttcatgcctcaccaataaggtggggagagctgctatgactctgtcatagggctgagacgaagatttgatgagttaccagcaaaaagcatttaatatactgtctcattcagaagcagtcaatacacattgaactcttattacttagaggaaagaaaggggtcgatgatttatagataaggcctgagtgaaagaaataaatgtgtattgagtatcagcaatggactacgcatcattctgggtaactatcactgaacacatttaatctgcaaatactatctgaaagatactgccatctgaattgcataggtgggaaaagtcaaggcttttgtgcttatttttaaatgtatgttaacatgaataattaattggccgtgcactggtcgcacgcctgtaatcctagcactttgggaggccaaggcgggcagatcacgaggtcaggagatggagaccatcctggctaacatggcgaaaccccgtctctactaaaaatacaaaaaaattagctgagcatggtggcacgtgcctgtagtcccagctactcaggagactgaggcaggagaatcacttgaacccaggaggcggaggttgcagtgagccaagatcacgccactgcactccagcctgggagacagggcgagattccatctcaaagaataataataataataattagtgggaatatatgctgtttgttgtgataggagaagaaaaggggagatccagatgttggtcatcagaaatgacctgcatcttctctaaattgaaatttagcttgaagtagtaatgccaaggccagcctggggccatggcatcctggtgtacctgcttgttggtgacagtccttttaggacaaaatatcttacaaaaacattcatagatgactaactggaaaaaaagaagttatgatgaaaagcaattcttactgtttttgttttttgttttttgttttttttaattaaaagacaggcagttattctctttcccaggcttgagtacagtcgtgcaatcagggctcactacagcctcaacctcctgggttcaaataatcctcctgaccaagcttcccaagtagctggaactgcaggcatgtgtcactgcacctagctaatttttaaaattttcttgtagagacaggttcttgtaatgttgtccaggctggtctcaaactcttggctgcaagtgatcctcctgcctcagactcccaaagcaatccttacttttttaattgaagtgctttttttttttcttatttaaactcttaaaaattcatcccattttcttcaaaacaataaatcctttacaagggagaaaaatgaaatagagcaactaagaaagcatccatgaaggccaggaaggaacatcatggttaaatgcgattagtcacagccccttctgtctccagtcttggatgaataatggtaacagaactagagagatttctaagaccttggtgcttaataacaagcaagcatcgagggtggttgtgcaagatcctgatcacacaactctgcatatcaaatatccttcacaatcaacaagagtcagcctttaatctctgatgttttcaaatgttctttttttttaattcacatgtataacctatcctcttttcaatatatagagatatagcttatcagtcattacctcttttactacttttcttctgagatttaaaaggtcatcctctgatttgtaaattcaaccagatttcacagttcagatgagagttgtaataagttgccaagaactgttgcaagctgtgatggctgtctttctggggattatagagaagcacatttcttttaggaaaaaagaaggcagatgagcccaagttgttttatttttattgtgtatatgtatttgttttctcaagtacagtagcatggcctctgtggcaggcattcaccaagcaaatacagagcaccctctgggtcaagcactgtgttattggggttccaaataaagaaaaaagaccaaatccagccctgtggatctcacattaaagaggggagtaagaatcatagataatttaatgagttaggtacattaatggggatttgcacagtatttcataggagcacagaaaaagggtacctcgttccacctgagatggcagggagatggctcctaagttaactaagcaaaaggggaaggagaggcacatcccataggatatggataacacaacaaaagctccattaccacccgccccaccaccacacacaccatctctggaataaattttgtaccttccaactggttttcagggtactcatgacacatgggttaataatagctaggtttgcccaaatgaccaaaattctattcccaacatgaattttcacaactggtttttttgtttgtttgttttaatgaagaagaaatgttgtgtttttggaaatcatcttacaaaatcatgtagtggaatgcatatagtgatgaaattgttgaagaccagggaatctttgtccttagtttttattaggatggatgttttcaggtaaaactaaaataaaaatgaaatggaaccaattagaaagaaaataggagcacttaagacgaaatgtaattgttgctgaaagaattagaatctgatagcttagaaagaacttaattaaatttcagagtaaaataaatacagtttagcaatggcctttctcctagaaaaatataatgtctcttacagttcagttactccttggcttacaaaatagtggttaaatttcctgtttttctcattttgatttcgtatgttacatgttactggtgatgggattatctgtgtgacattacctctggtcttcaaaatgtacacgtagcaatgtagtctcacatatgccccttgggtgcgaaaagagaaggacctaacttaacctgacagacctcaaatctgttctctttctatagcagagtactcctatttaaaaagaaaatgttgagtaaggaggacagtcatcatatatgtcgagaatgttaaatgctcttgtggaagtgaaaagcagccgatctaagtaattacccattaagaaaggagtaggagaaatgtttagaaggcagacctgcaaaaaggtgactcacagtacgttcacatgaccggatgcattagtggaacctctaacccatcgccaatggaagaagcagtgttttgcacaaacttgaaaaagagtttttcattttcctcccacagcctcgtcacgtgttcaatatgctaaagaagtatgtccgcgcagaacagaaggacagacagcacaccctaaagcatttcgagcatgtgcgcatggtggatcccaagaaagccgctcagatccggtcccaggtaagcgtggggtataatcatcttctgcagctttgacaatccaggattcttgcttcttgggttggtgacaggatcccacgcattctccgagcacctataggtgttttccctatggcaagagctctttaacttctggtaaattctaaaagcttgtcttagagcaatatgtggtttggcattttctgagttatgaaaataacaaatgtaaaaatcttagtctactgctaactgattgctaaggaactgattaaaaccaatgactaaaatgagaaaaacaaaagttgtataaactaaaatcttgaaaactggttcaactgaagtatggcaggcaatcataaacctactggaatgttgagatttcatgtgagcctaaatgaagcccagtaataatgtattttatactccccggttcccaaaggctgaaaactgggatctaccttaggaaatgtgaaattttacattttcttgaatgaaagagttaaatatatatagcatgaaatagccaatcaaattgaaatacgttgttttctagggggaaatttgcaaagaaatgtatttaggcatgagggtcctgttaagagagcctcagtattaggaatcagaggtggcagaggtagcctttttaattggctgttataagcatacaagataatggtaagtttcaagatcaagtcttaaacctgagctcaaaaagttagagaacagaaataggagaacaagaaaaataaagttgccctttcagttcaacctttttaacagtagcagtgttttgtcagttttcttttggaagtttgtatctacctgcagtgcttggtaagaaaaataacctgggcgacagagcgagactccgtctcaaaaaaaaaagaaaaaaagaaagaaaaagaaccattcctacccccagacattgttgacctggagttgtcatcctttgatgcaggttatgacacacctccgtgtgatttatgagcgcatgaatcagtctctctccctgctctacaacgtgcctgcagtggccgaggagattcaggatgaagttggtaagtaagctgttcttttgatgctgcacatggacatgtattttcccccagaggaaaattgaggaagtgagttatctgtttgaggaatatggaagttaatagaacagcttgccttttacgatgaaactgtcaggctggaactagcttactagccttagcaattgaatcagttcttacctctccatacttgtaagactggaggaatgtcgcctgacttagggtatagttttgtaataattggacacttgttattgaattatacgtggcagcattttttctaatttgcccaatcttgttatggctctcaaattatgatgctttggtactttacaattaatggggaaaaaaactcattcttcatcttttgagtgtcacgattgttccatcttacaaatgaaaaagctcaaacttaaaatttgagtaacttactggcctgtgtcacatgcattataagtagcacagccaaaacacataactgtgacttgtgactttgaggttattgttatattcagtaagtcacaattctctttgatggctgagcagggaagccatgagtgttctctgaaccacatcattgtttaaacttaaaagatagtgggctattaaacttatattctgaaataattgtactctcacaagaacttggaaaaatagtacagagaggtctcatgcatccatcacccacatgcctcaccagtgacatcttacgtaactatagtccattatcaaaaccaggaaactgaccttgtgtgcccactgtcttttatgtccctagttttcctaatgactaatgatttcatttaagatctctcatttctgtttctcttggaaagagaataaaataccacatgagtctctgtcagctgccaaaatgcccataactgtttaacttacttcacaaaggtacatagatgacgattatgttggtgcatctttcaatataagcatatgtacctatactggagatttagtgtgtagtctaccaacatataagcaatatgtatctggcatatccttccccataaagaatcctaccctttgttaattgggttggaaatagatacaggttatcatctggaatcagagcacccaggatgttgtagatggatgtacccattacagtaagtccgactttgaagtgcctgaaacaccgctcaagggaacagctggccctcactttttcccattttatgccagtgttattctgctcattctttcctgatttatgtggccttgtaaatattgtttgtattgctgtgaaatatttggcatgtgtcaagtgatgatgttctgttcagtactgcacattaatggacggaatctgaaattatactttgagctacataacttgcagaagaaacttcatatgtcagggaggtgcagtgtcccagaactttgggaggccaaggtgagcagatcacctgaggccaggagttcgaaaccagcctggccaacatggtgaaaccccctctctaatttaaaaaagaagagaaaaaaagcaacttcatagtgtgccaagcttttgttcagaaggagcaactcagtgttgagcaagaatttatgaagatagtggaggtggagtttttagtctacaccatgaattgagaacagagatctccaattaatttttcactgtatcaagtttctttagcaaacaaatatacttttcaggtatacttggagaatagacatcagtaaggaacctttaaaatactatgtattaaataagtgtaaagaagttctccaaaaagttgtagaaggtacaaaatgaaataatttatcagtcttaatgaactgaagctaaaatcttctagaaaacatggtttgtttgtttgtttgtttgttttttacagctatcttaagcctgttttcacatgtgacttcagttgaagtggcataggtaataactatagggaaataagccattacaaaggactaaaaagttgatgaccaatattccaccctcacccagcaattattgttgactctttataattaaattattagaactttttatttggcactatactactgaaaacattagccactaattagtcacacttccacagaacagatggtggttcagatatcttgaatattacgaaatgcccaagaatagggcagcacaataaacttcaaatctcagtaccagggaggatatttagataactagtatcatggaatctttttctgtaaaaagaaaaaaaaaaacagccattaggttggattaagaacatattagggggtgcagcacaccaacatggcacatgtatacatatgtaacagacctgcacgttgtgcacatgtaccctcaaacttaaagtataataaaaataaagaacatattacgtatgtgctcttaatgtgtgtgtgtgtgtgtgtgtgtgtgtgtgtgtgtatgtatgtaatatgctctcaatccacccattagttgggtttttttaagtaatgacatatatatcattctaaatataccagatgccacattctgaaagataatcttttttaaaaacctttcatttggaatcctgggtgcttccatttttaaatgactgttctctatagaaagagaagtttgcaataacgaaccctgtacactatctgagctgctagtgtcaaagctacagaagtggtttgctggggagaatagcttttctgggttgaacctagttgtcatctatagtcctttttcatttgaaggaacatttaaaacaatacgtccctttttagtaggaatatagttgaaacttcaagattggccaggggtgctaattgcttaagccaaatgttattagaggttcctcatgttattctttttacttttgtatgtgtttaaaatttctcataataaaaagtgttgcttttagcttactttctaaataggttcttcatagattttttttccaggttatgtcttgtagtcgttctaatattctctgattaaatgctttgtcattagtctgagttgcatttatttgctatttctgtatataatcaaattttagatttggagtcagttcagtacaaatagcatactaaaattcagagacactggcaaaaggagaaaattttaaagtccctaaaaatgcatgccttttgtatagaagtttgtgcttataaatacaagcaattaggatgtgcttaatgcagtcaaacatctgtagagagatacaatggtttaattaaataatggtaacagttgctttatggataagaggttttcaccagtctggggaactgccagtatctttagtgggagaggtatatctgcttcagtaaattatgcttccaattagaattctcttttatgggtgaaaatgaggaagaatggagtcatgctgagaagaaggaatgctatcggtgaaggggaaaattgacattaaatttgtgagcagtaaactgtgaccagagcatagggttcatcatgcttgtgagttctggccctggccttgtatcttccattgtgcttccctgaggcatcctgtctgttcatgctactttcccactaacttcagtgaatcccaaattcatgggtctagccacagccagcgtactgaatcccagtgccatattccagaccccaaatatcccatgtgcctctgaacctgcaatcaatgtgtataacactcatgtccttctggaaatttacttgttttacacactctattctgagttctcttggttggcctaaactatccatgatgccttcctctccctcacccattatttcttattagttgcaagttctgtatatttggccttctgtgttcatgtgaaatctctgcacatcccctacttacctgagatcctgtcctctcatcagtgtcattagactcccagccagtcaccctacctcttatctcacattggccccctcccacttcaattcctccttttcggaactatgcaagttcccttaaaaacaaaagacaaaacaaaaaaaacagctgcaggccggcggcagtggatcacctgaggtcaggagttcaagaccagcgtggccaacatggtgaaaccccatctctactaaaaatagaaagattagccaggcatggtggcaggcacctgtaattcccagttactcaggaggctgaggcaggagaatcacttgaactcgggaggcagaggttgcagtgagccaagattgcactattgcactccagcctgggcgtcaagagcaaaactccgtctccaaaaaaaaaaaaaaagaaaaaaaaaaagctgcttgtggtttttccttgcttgaaaagttgcacctttcaagattcaagtaaaatgcccaagtcctataaaccctttctaatttgcatagagaacggagaaaagagctggcatttgagtgacaaccatgtaaccaactaatgagtgcctctttgtgataatgctgatggtcacattctttctttatgaatgttccccgttgaggtacaggaccgccatatagagatgtggcagtggcaggtggtttagggtaagagtggagactgataattttattctacatcccactcaaggagccaagccctctggcattgtgcacacccactggaagtgggctgttcttgcatttcacacaaaggcagcatatgggctagtgaagatactcggaaattcagtgatagcatccccagtttacagttgaagaaattgaactttgaacctaagagagtttgccaacttgcccagcccagatagtaaagtgatgaaagtggggtggaagccaagacctgccagaagtccaaaatctgtgttctttctgctgcctattttcctctctgaagtggaattttcccctacttaacctcaatgtgaaagcactgggtatccacctccaataccatactctaacttggagtaaattatttgtttatatctctactaaccctccatcctgtgaactcttccagatatatgttggtcatccttgcctcctcaagatccagcaaggaccctggtactttttagatattagtaattataaatataaggttgaagccagtccccaggataaaaaggcagatgctccttaacttggactgatgaagtgggctcctccgtaaccctaaagacctgaccaaaactccttccttgacatctagcgtaagcaccacacaaaacaaatttctttcctaggccacagcatcctctaaagctgtgattgatcaagctaactaaatggatgtggttggccaagataacaaagcataaatcagggttctgaggacctttattaataaaattttacaacatggtccttctttgtaccatgaccctctgctatttggtcatctacttgatttaattgtgctgtcctgtttgaccgccaaccacagtctgaagctattcccatgacaaataagtgtgaattttcaagtgtcctgttgtgttataaaaggcccgtgttttattttataatttcatatttttttcattcaattttaattattatgtgcaagttcccaggctcagtcatttattaatgtttttattttttaaaaagttattttcaggcagattatgaagatttcttgcaaagaatggcctcaggcattgtttgtatagagataaaatctcctcttttaaatcactatgtaggtcttcattaatattttttcattcaacaaacgatggaatcattatttcagtgaaactatggctcctcttcagtgttcatattctgctttaattatttattaatccttcaaaagggcagaatcccttcatcctttcaacctttgctttgtcaaattgttacttaaaaatgattggtgttttctttgtcctttgtaatcttccttaaatctctgctaaaaggattctattctactctttgtattggcactgaggttatttatcaaagtgtgcttctctttgcagctacctcaaggctaaaaatgtagctcttttcagagatggctgttttacagaatgctataataaccaatttatgagaaaggcagtaggaaataaagagggaacaaaggcataattgtttcatacccattttttttcttctagcattcaaaattaataaaaacatgaattattataaaccagatgcgggaaagatctctggctgaataaatccatagtgaatggggcaggattgaaagatatggcggggaatcaagaaattcgcaataatgaaaggatgcttattttttattacaattttactgtggcctcttgataaaatgttccactcttcaggaaaaatgcagcatggttatttcaaagacagtgtttccatattctgtttctaataagcctgttgatttgggggtttagtgggtccaaagtagactaggtttaaaatagaatatttatagcacttcccagcccaacaaaatagaaatttaatgttattgagaatttcaagtatccttatgtgtaattgttagtcaaggatgaacatcaaaaaaaaaaaatcataacagcaaatagagagctgtcactttgttcttataagaacataggtgtgactttgtttttcataagaaatgacttttaaatgtatatagatttaatggtttacagctgacttaagtatttggacataagaactttttttttttttttttttttgagatggagtcttgctcagtcacccaggctggagtgcagtggcgtgatctcggctcactgcaacctccgcctcccgggttcaagtgattctcctgcctcagcctcccaagtagctgagactacagacgtgtgccaccacacctggctaatttttttgtatttttagtagagacagggtttcaccatgttggccaagctggtctcgaactcctgatctcaggtggtctgcccatcttggccccccaaaatgctgggaatacaggcgtgagcccccacatctggccaagaacatttatacatattatcaacaaccaaagccttgttcccccattggtttcataatagtctcagagctccttattcatattttccctagtgttattaagtaacagacatgaggcctgtaagtttagctgcctgtgtctaaatgtatatctttgacccaagacaatttctctttcaaaatagaaccactcatttataaatgaaaatgctttgtcaaatgaatggcaaagtacggtatactattaagacagcctcctagttttctgacatttggactgccatgttgaaatgtctccacacagcaagatacaaatgtgtgaatgccagtacacttcataccttaggtccccaactggtctgtctgcagacttgaggttacagacctgcaggtgtcgaactcaccccatagtggtggttagtagagtgctttgtatacgtttagctctctatgccttttttggttgtgatattaggtaagctctctttttcttgctttggagcttaattatggaatctgtaaatatagtgcatatgtcatccagatgatctgtggaagtcattgataatgacctttaaaaattcacatgtaatacagcatccgttttcctgaatgatttttatagttttaccattggcaaacagatactttcttttatgtatttctactccataattttaggaaaaagtaaatccttttagctacattaaaaagaatacactttctaggaataatgaatgtaaaaaaagtttccttttttaaaaaaatattgcgctctctaccattctggcagacaaattgttgaccttaatatgtataattcagtgcagtatattgatcttgtttattgtgctccaaatggacgctggcagaaatttgaggaattaaatatcaaccacagtgttttcttcatgcgattgcaatggtttgttatggattattttgttcagttcaaataaatgatgtacgttcagattctttgcccaattttttaattgggttgtttaccttactttcttaattttatttttatttttatttttatttttatttttggagacagagtcccgctctgtcacccgggctgaagtgaagcggcatgatctcagttcactgcaacctccgccttacggattcaagcgattctcgtgcctcagcctccccagtagttgggattacaggcacatgccaccacatccagctaatttttgtatttttagtagagacagggttttaccatgtttcccaggctggtctcaaactcctgagctcaggcaacctgcccacctcggccttccaaagtgctaggattacaggcgtgagccactgcactcggcctgctgttattattgagttgtaagaatttttatatattctggatactattaaattcttatcaaatacattatttggaaatattttacccattctgtaggttgtattttcacttccttaataggatccttttgacacacaaaaattttcaatttagaagtctattttatcagttttttcttttgtggcagttactatggtatggtatctaggaaaccattgtccgaaacaaggttacaacgatttatacctgttaccttctaagagttttgtagttttagctcttacagttaaatctttgattcattttaattttcatatatggtgtgaggtagaggtttgactttattcttttgcatataaatatccagtgtcccagcaccatttgttgaaaaagactattcttgccaggtgcagtggctcatgcctgtaattccagcattttgggaggccaaggtgggcagatgacttgagcccagaagttcaagaccagaatgggaaacatggcaagaccacatttctacaaaaaaattatccaggcatgataacatctatttgtagtcccagctactcaggaggctgtggtgggaggatctcctgagcctggggtggctgaggctgcagtgagccttgatcacgccacctgggcaatagagcaagaccctgtctcaaaaaaaggaagaaaaagactattatttcccccattgaatggtcttggcactattacacaaaatcaattgtccatagataatatgggtttatttcttaattcttagttcttttctttgatctgtgtgcctgtgcttactgtagtaccacactgttttgattattgtagctttgtagtaaattttgaaatcagcaagtgtgagtccgttatctttgttcttctttttcaatattactttgagtatccggagtctcttgcattacaacatgaattttaagatcttcctcaccccctgcccccactaccatttctgcaaaaaaaaaaaaaaaaaaaaaagtgcggattgcattggatctgtagatcattttggggaatatttatatataatgttaatgaggttttaaacaacacttttatctactagaactgatatttgcctcgaaatgattccaccttgagccccattcaggaacgttagtattttagaagtagcaagagaactgatttagcatgctatcatcttttactccaaattttggtgagattccagagaaattatttgtgagcttttccttaagccatgatgactgacatgtcagtagtttttgtctgtttttatgccattcttttatttttgtgcatgtgtgggcacctcaaccaaatggatggagcctgaggcatggtctcccacgccaaagtctgccgtttcttttgatgatccaatgcagttccaaagctattttctcaactcaccagctcgtttgtatggccctgtaatttgaaacaaaatctaaaaagaaatccaaattaaaatgattgggaagtgaagtcagaccacagtggtggctgtggaactacttcctggcatggaacactagagcagatgtgtcctgctttttttgtagagtcttgggaacaaccaatgattttagactggaacaagggctggttattctgtttttcacaagcatctgccttcaaggttcattttttaaaagaggaggggaaaaaaatcagtgatgtttgccaccctgagtatggagatgaatccaaattgagattaattttgaaatatgtttcccgaattttgagattaattttgaaatatgtttccacaaacactaactgggaatgacatgagtttgtttcatgtgagacggagtttggaagacatgttaatttgcttgttggtgttcaactcagaaacaaattttgcatgtattttctgagtaagtgccattattagttaacagttttcctgccgtatgcactatgggctgctttagaaagtaaatcatagaaggttagttataatatctcatcaaaaatagtggatccatctattaaccggttccaagttatgagacgtgtccaaaggaatgttgacttggtgtgcacctaaacactatttgtgaagaggctttggacttcgagcatgaaacggggtcagagggtcaaggccagggcgttacttaatttcagctcctgttgatggattcattgacttcagatagtgcgtttaaaaaagcctgtttaatgtgtttgtcttttgataattattatgtatttacatatgctcctaaaagcatgagttaaatcttatttctttgaaacagtgcttggcaacaacttgtattgtcttgtacatgccttttgtgtctttgcttttggttgggggggggcattgaaatttgtctgcccatcccctgagggcagatactgaggtgtggacctatgtcttcagcttcctgtatagcattgaagttgctatagctgcatgttctctaaaatttttatacatgcgatttaattgttaaagcttatgatttttaagtatagtattctgatagcaaatagattttgtcaaataaaaactaactttatcatcaccactgagatatcactaggtatatggcttagttctcagtcaccacttttatttgtaaggaagtcttagaagttttcacaagtgtatatgtgatagactgggcacagtggctcacgcctgtaatcccagcactttgggaggccgagtcaggcaggagttcgagaccagcctggccaacatggcaaaaccctgtctctactaaaaataaaaaaattagccgggcatggtggcacatgcctgtaatcccagctactcgggaggctgaggttggagaattgaacctaggaggcagaggctgtagtgagctgagatcctgccacttcaccctagccagggcaacagaacgagactccatctcaaaagagaaaaaaaaaaaaaagctgggtgcggtgctcacgcctgtaatcccagcactttgggaggccgaggtgggcagatcacctgaggtcaggagttcgagatcagcctcaacatggagaaaccccgtctctactaaaaatacaaaattatccaggcgtggtggtgcatgcctgtaatcccagctacttaggaggctgaggcaggagaattgcttgaacctgggaggcagaggttgtggtgagctgagatcgcgccattgcagtccagcctgggcaacaagagcgaaactccatctcaaaaaaaaagaagtatatatatgatgcttgctttagcagcacatatactaaaattagaatgattaaagagattaacctggcccctgcacaaggatgacatgcaaattttgtaaagtgttttatatggaactttacttacatgaggtacctagggtagtaaattcatagatacagaaagtagaatgctgattgccaggggctgagaggatgagggactgtggagttagtgtttaaagggcacagaggttcaatttggcaatattgaaaatagttcagtggggaagatggatggccgtgatgcatcgtccatcacattgcacagcatcgtgaaatatacttaataccctgagcgttacacttaaaatggttaaaacagtaagatttatgttatatatatttaccatgataggatatatatatgtatattcatatcattcgccattgtgaatagcaaggagattgaagaaataaggacacaggatcttcaataaatatgtattaaatgcttcccatgttccacattctttgtcattgccagacacgtcacaggtataagggcccaatctttgttactcaaataatttagaataatttagaatttgcttggggagactttggataaacagttaagaagctgtatccattaggtaaagggacattgcttgctgcgtctcgtagcatttggtagtctcgttagacagccgttcttactcctatcgtttgctgaaatttattagcaaaggaaagaatcttagttttcagctcgttcagccgcatgatttcataggctcaggaaaaccatgtaatatgcccaaggtcagacgtgatgaataagactaaagactgaatctattccagtgtctctgtgtccagtgatacttacttactgctgttgccaagttaaacaaaactgggtttgcagagctgtttattcaccttcagcatcttttcattgaaaatgcggtagatagaagaaatgtccctcttttagcatttgtacctcagtaataagatgcttcccaagctcaaagactccacacccttaaatatgtaagtcagtgttaagatatttaaagagaacatgaatatcagctacattgtgcatgttgcaggatttttatattattttgtatcttctgcttagaagtcataagccagcccatgaaccatgccaacaaacataccttcttccatgtgattattgcagccagatttttcagtgcaggacaagcaaagttttctctgaaagcatgagataataattctcagccaggtcttcgccatttgcaagggatcagacataagagtttttagctctgttgatgttaatagctagagcccctgttagcagatggcatgttagtggcctgttgctgctggctattaaatcatacacattggccaggcacggtcggtcacaccagtaatcccagcactttgggaggctgaggcgcacagatcacaaggtcaggagtttgagagcagcctgaccaacatggtgaaaccccatctctactaaaaataaaaaactaggcaggcatggcggcacatgcctataatcccagctactcaggaggctgaagcaggagaatcacttgagcccgggaggcgaaggttgcagtgagccgagatcacgccactgcactccagcctgggcgacagagcgagactccgtctcaaaaataaataaataaaaatattaaaagtaaatgatacacatcatgagatcatctcccaaggcagcagagaattttgcgtatttttttcttagtttatattgttgcaacagagtaattcttcttgatcacagactttgctttttttgttgttattgtttctaagtttcacttgatcctcaaaataacctgagacagacaaaacagataggttttcccattaatctccttcatgagtctgactttgccagccaggctgatcttatatccatagccctggatgcatttatttatgttattccatctgcctataatgcccatccccaatcttggcctattacatgtgtctaacattactttgatgtgtacatgtcagtgaattaccacttaactgattgttagctttttgagagtatgtatcaaatctcatgtgcatttgtgtgtcctgaaacaaattattaggtataaagtatgtattgcaaataccatgcccagggaatatttcagagctgtggttctccaagtgtggtccttagtctagcaacatcagcatcgcctggcatcacctgggaacttgttggaaaagcacattccatgatcccacccctgacctcctgaatcagcaaagctagggatggggctgagcaatctgtattttatcaagctgtccaggtgacattgataaatgctaaactttgcgaattactgatttagagactaatcaactcattaaaaagttaataaataggtgagaatccattgtagcaccccagtcacctatgctattatcttctaaattcacattatacaaattgtatgccacaaaaatgtttaaggtgaaaacccaaaggaattgatgcattggattaattcacaaaaatttaacagctgcaattcatagaaaaaaaatgcatgcatatctgataattagttgtagattaaaaggtgaacaacttcttattattaataccaatgaaaatgtaattttttaaaaattatggccaattggtagttttttaaaaatctgttatgccttgtcatgataaggataggtgaaaaggaactttcataaactattgctaagtatatgggtgaaaccttttagactatttgggtctacctaataaattaaaatgttcagtcttttctaattttagcaccgtatttctacagatacactggcatatctgtggagaggggcacttctgcttgtcacctgatatcccttactactactaatatttttataagcattattacctttaaaatcatgttaaagggtaaatgatgtgcaacagactcagtttccccttctctgactcctgtttagtttacatctcttttctctctctcatttgggggctcaatacccttaagattatagagaaattgcagtaggtaatgttggctggaaatgctaacttgtaagaaacttgggtggaaatggtttaagccatcagcctaaacgatcagtgaaaatgtcagacattctccgctttcttcttccaagatactatactctactgtggccttagagttcttaattcctatataattctgattaaaaaggaaggagatgctcctaatataccttgctgttgtcccctcctgttcattagggtagctgatgtcagtcaaaataaagtctagaaattcttgagtactttttttttttgtaatatactgagaatgcttgaagcaaactaaccaaatttaagtgttttaaggatattaacagtaacaggagagcccctcgattttctgctaagaatcaacctgaacagtttccagactgctggttggcaatgtcagtatcatgagaaaaactgaaaaaataagaaactttagagaaaaagaggaatcagtgcaggctaggggaatgaacttggtaatccagtagtctttccctgccagcattttgattgataagctaagtgtctgctttttctcatcccttattttttggcaggaaaccagtattttgatacttgaatgccttctttctatcttaagggagaagccttcttaaacttcaagtgtgaagtagatcctttaggtataggatgaaaaattaagtgggactatttgtgaattactaaatcgcaaccattaaagaaactaatgccctaattagcctgtcttttgacagacatggcatccatatgtaagtctaatattgtatgcaaatgtgagacaggttttgctttctagatctctttgatgtgaaaggaaaagctggcttcctggcttccttcccatgttctgtatggacctgccttcatcctgctgccaacagctcctcaagggaacatgaaagtggaattaaaccctcctggttttcagattcagaatcctgggtgattaagtggcttgatcaaaatcagaaactgtgaaagtgctaaaaatggtcaaggcccaaggagttcctcatgtgtggtcaaaagcctttcagaaatcaaagtgtgtctttaaatacctggggtgcaaaaatcagatgttttttatttaaagaaaaataggtatattagagcagaactgggggccctctgtaggagcctgagtctgggtgtttactgtcgtctaaggccttgttaatgtgggcttgaggcttcggaatccacgaacaggggaagctagcgtctctcgctgactccagtcctagctcgagctttccatactgccctacgtgacttctgcacttttgtgccatcagccagtagactgagaaaagtatctggtatttgtcggtgtcttcggtttagctgctttaagtccttggatggaaaaggctgattgtcatcctgaaatcattgtctcctaatgtgtaattggggccaagtgaagcacagtaatttagaggaattctagttaaaaatacagattcttgggctctacctcagacctacagagatctgcatttttcttattcccccaggtgatcctttaaacattcagaggtttttaaaactcatgcttatatgcaataacaaaaatataaggattcttagaaacttgttatatttgtcttgaacatgggatgacagacattgtcattttcattgaaaaaaaaaatgaagcagagactcagaatgtatttagagacaactctaaatacattctggcagagcctaactactggattgcagagatcctccctgcttcccccagtccccatctataaactggccatgtgaatttctagtggtgttcacttccaaagtggtgattttataaaatattacaatgaagcattattaacctcaagaagttcagatgcatagagagtttatttgggtgtggcagcattagtggctaggttttatttatccaagataagacttcttattagctatgaaaagggattggcataaactgcttattaatgtccattaactgtatctaaagggaataaacagtataaaaggccaggcatggtggctcacacctgtaatcctagccctatgggaggctgaggcaggaggatcatttgagcccaggagtttaagaccagcctgggcaacatggggagaccctgtttctacaaaaagtcaaaaaaataataagctgggtttaggggtacacacctgtaatcccagctagtcaggaggctgtggttggaggatcacttgagcccaggagttggaggttgcagtgaggcctggcggcaccactacactccaggctgggtgacagagggacgaccttatctcaaaacaaacaaaaacaaaaaactgtataagcataagatgggcttgagtcacaaaattctgcctttcataactttcccccatttgctgtttgatttgctgtttcagaaattgtgaacctacttctctacttatagaacatttacctccctcttagattcttccctttctatcattgatactgacattctgcttaaagaattatccatttaggctctcttcaaatccaaagtgatattattttattttaataagagatgaaagggaaaattgacaaaatgtgcctggagttgtcagcattgtaaatgatggactgtaaaagcttcgtcttggaagattgtcagagagcctagtgccagctcaaaaagtgtggtctttttagagaattgacagaaatgttacaaagaaaacatgtgctgaataccaactccaggtgcgaatcctgagaagcaactcactctattctgcagtaggagatgaattttgcaggttatacagcagagcaatttaaactcccttgtttcttaaagtatatcctatagtgacttgggatggaagtcatatactatccccttttttgttccttcaaagtaaatacaccacagagctggagatgtcccagacacagggggaagctgtttggatttttcccactgcctgtaatgaagcaagatagggaggaagaacttgggaacttgcgtggcaaatggtcaagtaaagaaaaagaaaagctttttctttacttgaccatttgtcacatgtgctttcaaatcctgaactgagtcacatctgaaataaatcacttccttgtcatttccatgaaaggggcagtacaagaaattccttgcacatccctggtgagccccttgttactctcagattcagctattgccttcaggaaaaaaagaaaaagaagccgaagaaagaaagaaaacagaatcctctagaaaaagctattctgacctgtgctctttcttttgtctgagtgtgactagataaatgcattagtctgctagggctgccataacaaaataccaaaataccacagactgaatccttcaacaacagaaattatttttctcatgcttctggaggctggaagtccaagatcaaggtaccagcaggtcggtttctgaggaggcctctcttccttgatttacaaatggccacctacgcatcatgtcctcacatggtctttctcagagagaaagagaggtgtctcttcctcttcttcttttgttttgttgagacagagtttcgctcttgttgcccaggctggagtgcaatggcacgatcttggctcactgcaacctccacctcctgggttcaagcgattctcgtgcctcagcctcccgagtagctgagattacaggcatgcctggctaattttgtatttttagtagagacagggtttctccatgttggtcaggctggtctcgaactctcgacctcaggtgatccacctgccttgccctcccaaagttctgggattacaggcgtgagccccgcacccggcctcctccttttcttataaggacacctgtcctattggatcagagtcacacccccatgacctcatttaaccttaattatctctttaaaggtctgatctccaaaggtcccttgagggttagggctttgatacatgaattttcaggggcacacagttcgatccatagcagttggcttattcatactttgggtagatcctcttcatcgttcctcagctactgtctatttagtgcacagcttctttatcctaaagctagtcaggggaggcatggaaggtattatttctcctgtttctgcacctaaggcattaaaacgaggttgtggtctggcagcctaaactcggccttgatgaacttcaaatcctagacctccttggtatgtgaagtgcatacacttgtatggagggatttgacaggttttttttttttttttttttttgagacagagtctcactctgttgcccaggctggaatgcagtggcacgatctcggctcactacagcctccgcctcccggtttcaaatgattctcctgcctcagcctcctgagtagctgggattataggcgcgcaccaccacacccagctaatttttgtatttttagtagagacggggtttcagtatgttgatcgggctggtctcgaattcctgaccttgtaatccactcgcctcggcctcgcaaagtgttgggattacaggtgtgagccaccgcgcccagcccagatttttttaaattagtttttagtgtatccacactgttaaagcaggtggatactgctggatagtataacaaagtatagtgtgacaaacccataaccaagcattgttagctatattttctcatgtcttgagccaaaaggtcacagttaacctaatgttgctactaaacactcataccataaaacattctattccagtcttccagattttacacaagaataaaatgaaaacttttagactactggagatttttttttaaatacacaatttgttgaatgtgaacgctaaattgaaattgacatgctaagttttatagattacttcagctgccctgacttcagtaaatttagttgtgacacaggtacaacagctgacttctttctggcattagaggtggtgatgtttcgtcactctggagttagtaaaacctgaaacccgccaggcatttgacacacagtttgctgccagggacagctcagcttctggcttattggagaggaaatgacctaacctctgtgtttacaaagtgtttgaaactgaggcccttccacttccttgctgagtgtaagggttgacctggcatccaaaatccccatgatcttctcaggataagtcatgcagccattggtggtcaagaaaggatttgttccctgtggaagggcattggaagaggaacagagctgaaacacacgggtgttcagagggaaaacatctctgcacttaagagggctagattagactattagactattatcatagagctcgtgattcatctcctttgtttaattccagccttgagtaaaggactcactaagaaaccacattcggccgggtgttgtggctcacgcctgtaatcccaacactttgggagaccgaggcagatggatcacaaggtcaggagttcaagaccagcctggccaatatggtgaaaccccgtctcaactaaaaatacaaaaattagtcggggatggttgcgggcgcctgtagtctcagctactcgggaggctgaggcaggagaattgcttgaacctgggaggaagaggttacagtgagccgagatcacgctactgcattccagcctggtgactggagcgagactccatctcaaaaaaaaagaaaccacattctattccagtatatttattataaccagaaattcttgtcttatcagcaaatagctaatattcacttacatgggcagtgtattagattcctagggctgctggaaccagttaccacaaaccgcatggccgaaaccaacagaaatatactctcattatctcattattctagaggttagaagtcctaaagcaaggtgttgccagggccacactgcctcttacagctctaggggagaatctgtttcatgcctttcgcttgctctagtgctgctgccagcccttgatattcctttggttggtacatgcacccctccaatctccacctctgtcttcacatggtgttactccccatgtctctgtttctgtgtcttctctaatatgattaagggcccacccttctccattgtgacctcatcttatatctgcaaagaccctgtttccaagtaaggctgtattcttaggtgtaggcattaggacttcaacatatattttgggggaaaattcaacccataatgcggttatgtttttattttccttgacttttaagaatgtgaactattgtcaaattttttcaaccactatcaaatttaaatctaagaactacatgtcttaaatttatgacctcttcattaaaaaaaaaataataacatttaattggtaccaaaacgtgaaagagtttaatgctttgcatttgcttgaggctgattaatgagtaaatgtgtcaactgtggctgttttaattagccagggttaattaatgtttaccacacttggaagatgaaaaggcatgtataaatgctctataatgtgaatcattttttaatttgttgttgaagcttatagtgtagccaagtaaggattgcttacatcatacttacaaagggaggttcattaatggatacaaatacacagtttgatagaagaagcaagacctagtatttaattatcagcaaggtgactaatttacagtaatctactgtatatttaaaaatagctaggagaacctaatttgaaagtttctagcgtaaagaagacaggctgggcacgatggcttacacctatagtcccagcacttgggaaggccgaggtgggaaaatcacttgaccccagcaattcaagactagccagggcatcatagtgagaccccatctctacaaaacaaatatttaaaaattagccaggtgtgatggtgcatgcctgtagacccagctgctctggaggctgaggtgagaagatcacttgagcccagcagttcaaggttcaagtgagctatgatcacatcactgcactccagcctgagtgacagagagagacccttcctcaaagcaaaaagaaaagaaaaacatttaagtgatggatatcccattatactgatttgatctttccaaattatatgaatatattaagttttctcatataatctgaaaatatgcacatctattatgtatcaataaaaaataaaattttaaaaatgtaaaaaacgatgttggagcactatggtacttaacgtagaggctctgacttttgaggtacattcattacctgttactgaagttgagtatgctttaatattgtatgtttagaaaaggtagttacatttttaaatctgattgtgtaagaagaaaagagtagaaatgtttggggccaagtcaataattatttagtatatcataatttgagatgaaatgtgtttttttttttcttttttagtttcaagttgaaacattttaagaacagataaggaaaggctaactgtgctgagatgaaaataacatttttaaagtaactatcttaaagaaaatacatttctagaattttgtgtaaattttcaacaaagactcagaagcctggatgaggtcttgtgccaagactggaaagtgtggggattagaaaaagtttgaagagattgttgtgagatcctctcgtatgaggcctgaagctgtacatccatggaaagcagttaccccaggcgggaaaacaggttatccattctcgagtgagtggccgggtgggaaatagtccatcatgtcgaatggatcgtactttccagcaccaagatttgtggttctctaggtgaataagatgacaccccttcacttcacttcacttcaccattgtctgcatggagtacgtatctaaaaacaaattagcaaaaaggttgggtctactttacttttcatctcctacactattttcttctttgttctcggcaggaaaagatgaagttgcattttattattatctcataggattcttattctaaaatgatttgatttaaaacccattgcactttatttggataaaaaatgcttcactctctagttcttaacaataacaccagcctgattttattacgttaagcactgcaattagacaatacaaagaatttgcagcaacaacatgttattttatcatgggtggaactgttcattgtctagcagaatttattaccagataaatcccttttggggaatctaatgtggatgtttttttcaaagcgcctgtggagttctgctagtattgggaacgtttccattttcattctgatgcttccctgtgggctgtttcagcatagaagtgagctctctgggtccatgtttccattggctccacccaatattctgaaagattgcaactcaacatgtgtaaacagaacctttctcccccatattttctcttttcgtagattaaactcaggtcaagaattagaagtttatcctccaccccgatagcatctcgccctatcccaaataccgccaccaaaatgcccactgtttttccttgggccagttcctgaaatatctttctggctgtatcactcttgtgtgcatccttatcggctatgcttttggccattttttactgctgacttgtctggttagtcttttataatctccaggcttctcctccatcctttttttacagtttacctgttcatgaagcgcaggtcacttgacccgtagaattcccataggctgggattttgctaattgcatactcatggtataggtcagtgtattcctctgccctctgtatcccacaaactgaaagcctcttggctaagctgcttcccttttcacttcccttgtaccacagcagccagaagagtcacagatcctgggcagcttgtcctctgtgcctcggtacatgcacttgtatctgctaggacaatgatctctttccctggggccccactgtaatatcactagtcacatccctaaagcccaggcttgtttctttgtcattctgtcggtatccctaccataacacttgtaatagtaattatttttatgcccatcttttcttctgaaccatgagcccttcaagtgaaaagaaattgatgaagttatttctagcactcccctggaaaaaggaaggcaggcagggagggaggggctcactagtttatgataaagtggtttgattttcttggttgcagattatttcttttaaagtgactcttttcagcttctctcactcctgtgcatcgtgaatgctctcctgaagacagacgctttccattcatttccaagccccccatgtgaagtgctttctgttgccaggcttggtttccccacacgttgttaaagaagttaaagaagcttgtgaataagctaaagcagaggagaaagaaccattgctatatctagaattgttcaccagaaagcaagttttgtgttaaagaaaacacgagtaggccactgtgcagaagtgcttacagggtttgtgtgctttttaaaatctgcataaataaacatttcaaatgagctatcatatatacaaggatgatgtgctgtctgtgggaaaaggacccaatcctgtgttgtgattttacatatatatatatatataatttgtgctattacacacttgcctgatccccttataattatctgcataagtctttttaggctctttgaatgaaattcactatgtatggatgttgaaaatcatcctttctaccatgagctcatcagacttgctaaccaattctttgcatcctttgaagtataaaattccatcaattcagcatgtatcaacatgaatcaattagaatgcactttcttcacagcatggcggagtttttgctggctgccgggaggggcactgtttcccaattcattcatttgcttgggcccgccccaggatccttcttatcccggtcagatagacttctctcatgagcttgagagacggggctggtcacacaggacacggctttagggacacgactcactgaaactacaaaatgagtgctgctcttagagttgtacccacagcctgcacagctgttatggcaatgctgtgggcaagtcttgctacggcccattctcctccctcccttgtcctgttggaaggttcaggttggagctgaaattcagtccagcacgcagctggacaagccatgtctcctgtatgtgactcactccccagagaaagcatcatgtggactagtaagggcttggctttatcagaagcaaaggagaggtttacatctcttcttgctctctcttagtgggttcagagctccagcagaaaaaatgggacactgtggattgatctccagaaaaccccaaaaccagcactgaaggctccaggagattatgcctttagattgtatacaggcaccagaatgacttttgcctttataaaaatgcgtgcaagagcatgaaaactaatatttgaggaatttttttttctcactgtactttctggtcctcactgaaagcattggcagttttaaaaaatgaaatgtgatactgttatagacgtagcaaacctcacgtttcattttttccaattcattctatatctaggaacttacttagaaggagaaacaaactgtacccagaaaaaggaatgaaactggagaattcttcctcatgattcctctgtgtcctcaggcctaattatcctcattccaaagactctccattgcctcaataacttcgaaaaatttactctccttaagcatagtcataaaaattgcatagtaaagtgataaagagacgaaaataatgctgtaagaataaaaccattaaaaaaaaaccactactcttgattatttctgctgttagaattgtaaatgaattctcattccttttttctacatttttggcatgaaatttatgttactcttataattagtaaaaacattatattttattaataaaagaagactcacagtgaagtcataacatatgctgcagaggttagactcttcaagtcagatttgaagagagaatttcacgtaacaatcaccttgaaatgtcttcaggtcagccatcaaagtacacatctctcaaccagccaggcagccagtttttcctccagcatgtgaagagtgaagagatagctgtttcttggcttaaagaccatatgaaataattgacttatgtttaaaagatatgagggatcaggccgggtgcagtggctcatgcctgtaatcccagcactttgggaggccgaggcgggtggatcacaaggttagaagatcgagaccatcccggccaacatggtgaaaccctgtctctactaaaaatacaaaaactagccgggcgtagtgatgcgcgcctgtaatcccagctactcaggaggccgaggttgccatgagccgagattacgcctctgcagtccaacctggtgacagagcaagactctgtctccagttaaaaaaaaaaaaaaggcatcaaaattacattcacttctatttttatttttgtttgtagaagacatgcagtttgtatcacattaatgggcatatgatgtaatttcactataaatcgaaccagaggaagacatccaaatatgtataaattaaagctgacaatgcctacagtactaaactttttgttttagtataattggagacttagaaaagttctaaaaatatatttaaaaatttttaaaggaagttgcagacataatggccctttacacctaaatacttcactgtacgtttcctcaaaacaagaagatatgtgtgtgtgtgtttgtgtgtgtgtgttgtaatcttaatacagcatctttcagagattatttctgtagtatataaacttggtttttttgtttgtttgtttgtttgtttgtttgttttgagatggagtctcgctctgtcgcccaggctggagtgcagtggcacaatcttggctcgctgcaagctccgcctcccaggttcacaccattctcctgcctcagcctcctgagtagctgggactacaggcgcctgcaccatgcccggctaatttttgtatttttagtagagacgcgatttcacctcgttagccaggatggtgtcgatctcctgacctcgtgaaccgcccacctcagcctcccaaaatgctgggattacaggcgtgagccaccgcgcctggccataaagttgttttttagtctctactttaagttcctgacaacccaggcaggaccaagactccctaatgtagttggaaatcagatcagcacattggcacaagttctacaggtaaacgggaaaaaggagccctacaatctgcttttagatgccagggagcctggctggtctttatcttgattactgactgatgccactggtaggtctaagttctttgatctatgatgtttgaaagccaaaaggaaatgtgttttaaaggaaaagggacttcttctgtaccctcagtctaagccagacaagtgatatttcaggaaaatgtccctagcaataaggaatattttcacaaatgatgtgaagctttgtttgtgtcccttccagggcagtttgttaccataaggggacaaagcatgcttcatttaaacatgtgtggccaggaaactgttatttttaaacaaaaataaaccccgatttagacatgtagtctgagttttaactctgggagattttcaagattgatagtgtagctaaaaataactgacctaattttctggaggtcaagataaaaactggatttgtggtacagcatttactttgtgataatatgtgtataaattcttccccaagttggaaaatgtggccgcgtcatacagggctgtatctctcttgaccattgaagtgcctaggtcgctacactacaatttgacttagagttggtgaaacttctggccattcacgtagccatcgtattcatcctgagaaagggaaacctaaagacttgggagagtgttctgggaggaaagtgctattgagaatgggctgtccaagcaaagtgacaggcaggcctcacttagctagaagagggagcttttcagccctgctccaccatcaggaatctccgtgaccttggactactgctttaatctcttttatcctggcttctaaaagataccgtcgaattcattctttttcaaacctatcaaaaatttgaaatgtatgaaaaagagggtgcttgtgatgatagatgggtttatgcttccttttttttttttttttttttttttttgagacggagtctcactctgttgcccagactggagtgcagtggcgcgatctcggctcactgcaagctccgcctccggggttcacaccattctcctgcctcagcctcccgagtagctgggactacagtgccaccaccacatctggctaattttttttgtattttcagtaaagatggggtttcaccatgttagccaggatgctctcgatctcctgacctcatgattccaaagtgctgggattacaggcgtgatatgcttctttaatattagtttctaatccaagtaatatagccatgtcctctataaaatggaacttttcatggaacagtgagaaggttgcattaggaattgggatacttgggttcagatttcagttctgccacttgctagttttaagtatacttctcaggatggatgtcagtttgttcaactgtcagtgggagtagtgatcccactaaggaagattattgtggttatcaaatcagcagatgggtatgaaaaggccatgagtgcagttctcatggttatgaaggtgtcataactggcatagtcccatcacagtatggctttggcatcgcagatggctgtagcatatatgctaatcagaacatccctaccgtccttaaagatctcatgggttctctcccaaatcagctgctccaccgacctacaagtaagtccatgcttctttagtatatttactcactagtgaaggcccgtctgctaaaagtgtcttcagtaggggagagctgctcttttctgggaaacccagcaatgaagtttgtcctgtgatgccctctacacttactgacctgtttcctgagaacttcccgtaacaaatggtccagggaagaaggaagtctgtgaccagtctttcctttcctgtggctttctggttcagaaatgtgaccctgatgataagaaacttcaaggcatgactctggtgttttggcaatattcccctggcagtattgtttcttggctcacactcatctcatgccttgctttgtttgctttgtttttgagaattgtttttttgtttgttgtttgtttttggttttggcttgtgagacagagccttgctctgttgcccaggatggcgtgcagttggcacaatctcggctcactgcagcctccacctcccgggttcaagcaattctcctgcctcagcctcctgaataatggggattacaggcacacaccaccgtgcctggctaatttttgtatttttttagtagagacgggtttcaccatgttggccaggctggtcttgaactcctgacctcaagtgaaccacccacctcggcctcccaaagtgctggggttacaggcgtgagccaccacgcccagccattatgtttgtttttctttcatgaagggataaccgaggctgttgtgtggtggtgtcttggtacagctcgtggctgtggtcagtgtggtggagggtaggtcttctcagatggtaacatgcatgagagtcacctggggatcacattaacatgcagattctgattccctggatctgggtgggacctgaggttctgcatgtctaacaaactcccagagaacacccatgtagcaagagtacagacaaaaggattcaaagcgaagggactgcaagaaccatggaaccagcctcccacgattttgcggatgacgaacccgagccttggggagtttcagaggccatggagagatgaagtataataaacagcatagcagttgtatgttgagccaagaatcagacatgcacagaactgctgattggaaaattaaatctgtttctcatagccctggtgtggcaaaatgcctagctggaagtgggtgaccgcttgatttacagtgggcctcctgggtagggaaaattagtccatcccatttacagctacttccaatgcagctgtgtcaggggagagagaagaaaggacatggaagagagcgtagaggtatgatcttcagtcctttcaggcaggcacataagtaaatttttatttaaaagataagaattggtcatatgcgaatctcctgttagataagattaaaaacaaatttccattttgtggagaagttgcagataaatatttttccatgggatccaaaagaatcaaaaaggaaagaaaatagtaatagcagtggaggttcgatcctagacagaagaaaatccagcaagccgagggacttcatattctcactggtgtccaaatcagagctttttttttttttctttgtttactttaagttctgggatacatgtgctgagcatgcaggtttgttacataggtatacatgtgccttggtggtttgctgcacccatcaacccgtcatctaggttttaactccgcatgcattaggtatttgtcctaatgctctccctcccctttcaccccacccctggacaggccctggtgtatgatgtccccctccctgtgtccatgtgttctcattgttcagctcccacttatgagtgagaacatgagtgtttgggtttctggtcctatgttagtttgctgaggatgatggcctccagcttcatccatggccctgcaaaggacatgaactcaacctttttttttttccttttttttttttttttgtatttgcaaattcaaatctttttttttttttattatactttaagttttagggtacatgtgacattgtgcagcttagttacatatgtatacatgtgccatgctggcgctgcacccactaactcgtcatctagcattaggtatatctcccaatgctatccctcccccctccccccaccccaccacagtccccagagtgtgatattccccttcctgtgtccatgtgatctccattgttcaattcccacctatgagtgagaatatgcggtgtttggttttttgttcttgcgatagtttactgagaatgatggtttccagtttcatccatgtccctacaaaggacatgaactcatcattttttatggctgcatagtattccatggtgtatatgtgccacattttcttaatccagtctatcattgttggacatttgggttggttccaagtctttgctattgtgaataatgccgcaataaacatacgtgtgcatgtgtctttatagcagcatgatttatagtcctttgggtatatacccagtaatgggatggctgggtcaaatggtatttctagttctagatccctgaggaattgcgacactgacttccacaatggttgaactagtttacagtcccaccaacagtgtaaaagtgttcctatttctccacatcctctccagcacctgttgtttcctgactttttaatgatcgccattctaactggtgtgagatgatatctcatagtggttttgatttgcatttctctgatggccagtgatggtgagcattttttcatgtgttttttggctgcataaatgtcttcttttgagaagtgtctgttcatgtcctttgcccactttttgatggggttgtttgtttttttcttgtaaatttgtttgagttcattgtagattctggatattagccctttgtcagatgagtaggttgcgaaaattttctcccatgttgtaggttgcctgttcactctgatggtagtttcttttgctgtgcagaagctctttagtttaattagatcccatttgtccattttggcttttgttgccattgcttttggtgttttggacgtgaagtccttgcccacgcctatgtcctgaatggtaatgcctaggttttcttctagggtttttatggttttaggtctaacgtttaaatctttaatccatcttgaattgatttttgtataaggtgtaaggaagggatccagtttcagctttctacatatggctagccagttttcccagcaccatttattaaatagggaatcctttccccattgcttgtttttctcaggtttgtcaaagatcagatagttgtaggtatgcggcgttatttctgagggctctgttctgttccattgatctatatctctgttttggtaccagtaccatgctgtttcggttactgtagccttgtagtatagtttgaagtcaggtagtgtgatgcctccagcttcgttcttttggcttaggattgacttggcgatgcgggctcttttttggttccatatgaactttaaagtagttttttccaattctgtgaagaaagtcattggtagcttgatggggatggcattgaatctgtaaattaccttgggcagtatggccattttcacgatattgattcttcctacccatgagcatggaatgttcttccatttgtttgtgtcctcttttatttccttgagcagttggtttgtagttctcctttaagaggtccttcacatcccttgtaagttggattcctaggtattttattctctttgaagcaattgtgaatgggagttcactcatgatttggctctctgtttgtctgttgttggtgtataagaatgcttgtgatttttgtacattgattttgtatcctgagactttgctgaagttgcgtatcagcttaaggagattttgggctgagacaatggggttttctagataaacaatcatgtcgtctgcaaacagggacaatttgacttcctcttttcctaattgaataccttttatttccttctcctgcctgattgccctggccagaacttccaacactatgttgaataggagcggtgagagagggcatccctgtcttgtgccagttttcaaagggaatgcttccagtttttgcccattcagtatgatattggctgtgggtttgtcatagatagctcttattattttgaaatacgtcccatcaatacctaatttattgagagtttttagcatgaagggttgttgaattttgtcaaaggctttttctgcatctattgagataatcatgtggtttttgtctttggctctgtttatatgctggattacctttattgatttgcgtatattgaaccaagccttgcatcccagggatgaagcccacttgatcatggtggataagctttttgatgtgctgctggattcggtttgccagtattttattgaggatttttgcatcaatgttcatcaaggatattggtctaaaattctctttttttggttgtgtctctgcccggctttggtatcagaatgatgctggcctcataaaatgagttagggaggattccctctttttctattgattggaatagtttcagaaggaatggtaccagttcctccttgtacctctggtagaattcggctgtgaaccatctggtcctggactctttttggttggtaaactattgattattgccacaatttcagctcctgttattggtctattcagagattcaacttcttcctggtttagtcttgggagagtgtatgtgtcgaggaatgtatccatttcttctagattttctagtttatttgtgtagaggtttttgtagtattctctgatggtagtttgtatttctgtgggatcggtggtgatatcccctttatcattttttatcgtgtctatttgattctcctctttttctttattagtcttgctagcggtctatcaattttgttgatcctttcaaaaaaccagctcctggattcattgatttttttgaagggttttttgtgtctctatttccttcagttctgctctgattttagttatttcttgccttctgctagcttttgaatgtgtttgctcttgcttttctagttcttttaattgtgatgttagggtgtcaattttggatctttcctgctttctcttgtgggcatttagtgctataaatttccctctacacactgctttgaatgcgtcccagagattctggtatgttgtgtctttgttctcgttggtttcaaagaacatctttatttctgccttcatttcgttatgtacccagtagtcattcaggagcaggttgttcagtttccatgtagttgagcggctttgagtgagattattaatcctgagttctagtttgattgcactgtggtcggagagatagtttgttataatttctgttcttttacatttgctgaggagagttttacttccaactatgtggtcaattttggaataggtgtggtgtggtgctgaaaaaaatgtatattctgttgatttggggtggagagttctgtagatgtctattaggtccgcttggtgcagagctgagttcaattcctgggtatccttgttgactttctgtctcgttgatctgtctaatgttgacagtggggtgttaaagtctcccattattaatgtgtgggagtctaagtctctttgtaggtcactcaggacttgctttatgaatctgggtgctcctgtattgggtgcatatatgtttaggatagttagctcctcttgttgaattgatccctttaccattatgtaatggccttctttgtctcttttgatctttgttggtttaacgtctgttttatcagagactaggattgcaacccctgcctttttttgttttccatttgcttggtagatcttcctccatccttttattttgagcctgtgtgtgtctctgcacatgagatgggtttcctgaatacagcacactgatgggtcttgactctttatccaacttgccagtctgtgtcttttaattgcagaatttagtccatttacatttaaagttaatactgttatgtgtgaatttgatcctgtcattatgatgttagctggtgattttgctcattagttgatgcagtttcttcctagtcttgatggtctttacattttggcatgattttgcagcggctggtaccggttgttcctttgcatgtttagtgcttccttcaggagctcttttagggcaggcctggtggtgacaaaatctctcagcatttgcttgtctgtaaagtattttatttctccttcacttatgaagcttagtttggctggatatgaaattctgggttgaaaattcttttctttaagaatgttgaatattggcccccactctcttctggcttgtagggtttctgccgagagatccgctgttagtctgatgggcttccctttgagggtaacccgacctttctctctggctgcccttaacattttttccttcatttcaactttggtgaatctgacaattacgtgtcttggagttgctcttctcgaggagtatctttgtggcgttctctgtatttcctgaatctgaacgttggcctgccttgctagattggggaagttctcctggataatatcctgcagagtgttttccaacttggttccattctccgcatcactttcaggtacaccaatcagacgtagatttggtcttttcacatagtcccatatttcttggaggctttgctcatttctttttattcgtttttctctaaacttcccttctcgcttcatttcattcatttcatcttccattgctgataccctttcttccagttgatcgcatcggctcctgaggcttctgcattcttcacgtagttctcgagccttggttttcagctccatcagctcctttaagcacttctctgtattggttattctagttatacattcttctaaatttttttcaaagttttcaacttctttgcctttggtttgaatgtcctcccgtagctcagagtaatttgatcgtctgaagccttcttctctcagctcgtcaaaatcattctccatccagctttgttccgttgctggtgaggaactgcgttctttggaggaggagaggcactctgcgttttagagtttccagtttttctgttctgttttttccccatctttgtggttttatctacttttggtctttgatgatggtgatgtacagatgggttttcggtgtggatgtcctttctgtttgttagttttccttctaacagacaggaccctcagctgcaggtctgttggaataccctgcagtgtgaggtgtcagtgtgcccctgctgggggtgcctcccagttaggctgctcgggggtcaggggtcagggaccacttgaggaggcagtctgccgttctcagatctccagctgcgtgctgggagaaccactgctctcttcaaagctgtcagacagggacatttaagtctgcagaggttactgctgtctttttgtttgtctgtgccctgcccccagaggtggagcctacagaggcaagcaggcctccttgagctgtggtgggctccacccagttcgagcttcccggctgctttgtttacctaagcaagcctgggcaatggcgggctcccctcccccagcctcgctgccgccttgcagtttgatctcagactgctgtgctagcaatcagcgcgattccgtgggcgtaggaccctccgagccaggtgtgggatatagtctcgtggtgcgccgtttcttaagccggtctgaaaagcgcaatattcgggtgggagtgacccgattttccaggtgcgtctgtcacccctttctttgactcagaaagggaactccctgaccccttgcgcttcccaggtgaggcaatgcctcgccctgcttcggctcgcgcacggtgcacgcacccactggcctgcgcccactgtctggcactccctagtgagatgaacccggtatctcagatggaaatgcggaaatcacccgtcttctgcgtcgctcacgctgggagctgtagaccggagctgttcctattcggccatcttggctcccacctcccgaactcatccttttttatggctgcatagtattccatggtgtatatgtgccacattttctttatccagtctatcgttgatggacattttggttggttccaagtctttgctattgtaaatagtgctacagtaaacatatgtgtgcatgtgtctttacagtagaatgatttataatcctttgggtatattcccagtaatgggattgctgggtcaaatggtatttctagttctatatccttgcagaatctcctcactgtcttccacaacggttgaactaacactctcaccaacagtgtaaaagcgtgcctatttctccgcatcctcgccagcatctgttgttgccagactttttaatgatcaccatcccaactggtgtgagatggtatctcattgtggttttgatttgcatttctctaatgaccagtgatgatgagctttttttttttttttcatatgtttgttggccacatacatgtcttgttttgagaagtgtctgttcatatcctttgcccactttttgatggggttgtttttcttttttttctggtaaatttgtttaagttccttgtagattctggatattagacctttgtcagatggatagattcagatcagagctttaacagccagactttacagggaaaaggctgagtggcacctcctttatatgaagaaaatgttcttctccaacccacttgtgttcagtggatggaagaagctgttcagtaattataactgacacttgtaacacataactgattgatttaatgcccataaattttattttctttaatcgtaagatgtgaccgttaaattcttagaagacatttggctagtggattaataattaaaagaatattggatgaattcatctgcttcctattcagcagttcttttatttataaggctatttttctcaaaatgaatgatcatgaatatctaagaaaaaacaaaatatttagctgtttgaagatgaaattattatcttttgatgttgttttctttaaagtgtttacaatgataactaagtggtagggcttcttccctctgttactctaagtatgcctcgtatacatcctcaaagcattttttttttttttttttttggagacagagtcttactcggttgcctaggctggagtgcagtggcatgatctcagctcactgcaacctctgtctcccaggtttaagcaattctcccgccttagcctcccaagtaggtgggattacaggcgtccgccaccatgcacggctaatttttgtatttttagtagagacggggtttcaccaagttagccaggctgctcttgaactcctgacctcgtgatccacccacctcggcctcccaaagtgctagattacagacgtgagccaccacgcctggccacctcgaagcatttgtaaaagagcaaggtgatggggttcattaggtgtttggtatttgaaattaaatacctctgttattgatgaagccatattttaaatattatcaccactaaactcagttaaatatttccactgttaactacaaggttcaaatgcttggatattatagaagatatttgacttcaaagataaacgctacaattttgggtcataacaaatagcttttagaaggggaaaaaataagtcttgggaggaaaataagcagtctcttagtttaatatagcggttggcaaatatagatgcttaaaagttctgaaaatccccattgcaggccatcagagtgttgtaattaagtattaaattaattcagataaaaggataatccatcagggccactaatgtagtggaagtgtggtttcggtgtgattagtctcaccatggaagtcaaagaaagtcccactcagaatgaacaatgaaagaatcatatttgtctctgggtattttgtcataggctcaattgcccagtgccagtgtgtaagccactggtaaaatcctgagcccttagtcatgtctacaggtagctggctgccttagacattttatgatgacgaaattgaattccacttctgataatggtaatccatcatgtctacctctttttttctcttaaaactacactgacggccaggcgcagtggctcccgcctcatcccagcactttgggaggccaaggcaggcagatcgcctgaggtcaggagtttgagaccagcctggccaacatggagaaactctgtctctactaaaaacataaaaactatccggtcatggtagtgtgtgcctgtaatcacagtactcgggactgaggcaggagaatcgcttgaacccaggaggcagaggttcgttgttctgaatgacatagccaggggtggttatttctaaattttctgtgttgaattaagataggaatgtggatttcttcctattttgaacaacgaccaaaaaaaaaaaacgaaggctaagtgtgtttcactctgctaaaaatgtaccttttcttgaatctgtcactttttcacttacattttctgaaaatgaatataattaaccaccatggggctcagcatgctggtggccatttggaggaacttttctaccaacagtgtaacagagaaaagagaaaagggtactacagcgtacctcaacctcccctgactgttctgtgaagtacaagtgtaagatttctcactgtgatcttttgctcctctgcctttttactgccaagggctaagatgggcacagggccctttccagctgcccctgcctgagaaatgcttatttgatgaccaaaagcaataaccattccataggactaacggtgattaagtcagcttacaaatccacaagggtggaagagactgctaaagatattggaacagacatgcttaataatgcctaatttctacagctacttttgtgataatacgagaggctgaaatagataggggctgaacatgggaaggctggtgttatgaagcccaggacttggatttcagcactggtgcttactggccattgggtcttgaagagattggttcctttctcccagcctcagtctccttgtcccatcagattaataatgcctgccttgggagaggagagtcatacaggagagggcatttgagctgggctctaaagagttcaaataacgtagatgagcagagatgggcttccaagatagcaggaatagaaaacaaaagtgtcagaatgggtatgcatggtcttttgtgggaataccccaagctatttagcctgagagagaggtgtggtgtagacagctggagctgtgagttccatggctagaaatacggggtgggcccagaccacagagggccttcagcatctggcaaaggagttggaattaattcggtagaaaatgaagacccactgaaacaaagagggagccattcttgtgtgtcaggaactaagatttcaggaaccaaacgtaaaataaaaaccagcagggagaccattgtctcagtcggtttgtgctgttatcatgataccagagactgggtaatttataaacaaacaatagaaatactacaattctggaggctgagaagcccaggatcaagccgggtgcagtggctcacgcctgtaatcccagcactttgggaagccgaggcgggcggatcacgaagtcaggagatggagaccatcctggctaacacggtgaaaccccgtctctactaaaactacaaaaaattagccgggcgtggtggcgggcgcctgtagtcccagctactcgggaggctgaggcaggagaatggcgtcaacccgggaggcggagcttgcagtgagccgagattgcgccactgcactccagcctgggcgacagagcaagactccgtctcaaaaaaaaaaaaaaaaaaaaaaggcgccttgtggctgcatcctccagaggcagcaaaaactgttctcacatggcagatgcacataaaggggcctgtgctggtttcctctagcccttttagaaggcagtagtccattcgggggcacggggtggaactgtcatgacttgatttccagaagaccccatctctcactactaccacagtggagatttaagtttcaacacatgactttgggggacattcagaccatagcaagcagtgaggagactatcgtaattatccaggcgaaaagtaatcatattcctaggggcggtgagggtggtgtggaaaagcaagcaggaaatggctgagagaattcagaaatagaatgcaaaaggatttgtcggtagtgtgagtactggacacgaagaaatacagggagtcctggatggctctgaaggattcaagcctgtgactgggagggagaatggttctgccatgattagaaaacaggaaaggtggaagggaaagccagggaccttgagtacagttgtgtacctaccaagtgcatggatcaggagggagccctaagttggtatctccagcaaactgttggaaatatacaaatttgagtgggagggagaagtcaaagctggggaagtacatttcagattcacccaaaggtaggagatctttagagtttcaagagtcgatgggatttccaaaggggagaattgtagaaagagatggaaagagatacaagaagaaaatgacagggatgaagagaggagaaaaaaagagtaaaaagagttattcagagatgtcacagggaagaagataagtactgtgtatgcgaaacagtgagaacatttccaaataaaggacatggtaagtgatagtagataccacagacccaagaacagcgtagcccctggggagttcaagagctttctcgctggcaaaggttatttcctgtcaagatgaatgtgtatgcaccaataattattagtattccagaatatcctctctttagcatagtaagtgcttaacagtcacaagcaaaagatttatataaaagaaatgctcatttaatttatttaatcagacattggctaagttattagccgctacctatggctttgtaaaacatgaaaaagttggaggaaatctaatgagggtcttttatctgtaagggaaaggtcatcatgggcatcaagtattgaattttagaaacggtgccacagtgaatagggatatattataactcagattagacttcaaaaggactaatttgcttgggacttccatcatttaaaatcacttgcaataaaactgactacatgaaaagatattaatcacaagctttaatgctattccatcaaattattttaatgggtatatttgaacagaattttaatttttcagatacattttttgtcaatagaaaagagaatttgaaagatgattgtaaaatgttacaaatcaaatttaaatcctgatcttattttcattttctctagcaataaaactaaccagtgatgtgtctgaaatatatactacagcaaactcttgacacagctatgattggaaaatgagacattttggttaatcaaatattattgttaatagtgcagtgctgtctgtcggtctctaatttgtaaaaatcagagaaaaacatggtgaatctttggtgacataagagaagactcacaaatcttcatatcctggggtcagtttttaaagcagtaattacacatgatacaagattatattctaagctctctttttccagtaagaaaagataagtcaatgatgttccataaagctgattcttgtttaatcaatttttaaagtgggggggtaggcggcactgacagcattctttggaaagggaagcaacagaggagaaaggcaggatatttggtgtctgctcacattgggaaatacggggagccaggggtggttaagtccagagaaggctggatgtctgtctgcagggctacatctggaagggcaagggaacagtttccttgttgcctcagagcataggtcatgcagcacaagaggagcatttaggaaatgcagattttttttcaaggcaagacagtgaaaactattcaagaaggtagcaaactactggccctttaatgcttttcttatccttgcaagtgtgcaaggcaagacaggagattgtctgttgtctttcagcttgaatgagattgtgcctcacttactgccgccacaccaaagcctggcgtttattcctgtgcgatcattgtatactagggacgtctaactgtgtcaggaggaaatggcagctgagcccctgtggcctttcacctctagcagtgccacgctgcagcacattggccggctgccatgctcctgcctgcagtcctgccagcagctcttgtgagctgcgactttgcataagtagcttgaatgccatgtgcctcagttttcacatctgtaaaagggagatgataatggtacctatgtcatggctctaaacgcgatcatgcacgtgaaagcagttgaagtcttgcctggcagaagtaaatggtggctgctgctgctgctgctgttgtgattgttgttactcaccaaagagatggttttgtttggtttagatgagctgcttcagaaagagcaaaactattcagatgacgtcttggccaacatgattagtgaaccaaggatcagttacggaaacgatgctctcatgccatctttgaccgaaacgaaaaccaccgtggagctccttcccgtgaatggagagttcagcctggacgatctccagccgtggcattcttttggggctgactctgtgccagccaacacagaaaacgaaggtaagagtcccctgagccagcaagggcgttctgggaggtatatatacacatacataacgtgtgtgcaagagagagagttatcttttgtatgttcttgagtggtgaattttttttgatgtagtcataaatattttcattataattttactttaaaaagtaaatactaggagttactatgtcattaaaataatatatctgtgtaaattattctttatattttttatgctgcaaagcatgtaaactgccaattgttggaaaagacaacaactccattgtataggtggcaaaacaaaatggtaatgatttacataacatttgcaggtaaagggcctcttgtttcgcacatgtccaggtttgcattctagggaatattatccttcgagtgaacactcccggacgaaggggagccacagtgtattattgaagaggcagttcttcacaaggaaaatgtgtggcaataacattcttctaatttttattttccagttcctcttcttaatataaaatggtacattatataacaaaagtggatacataaagagcatgtactgtatatcatattattatgtttatgactttttcaaatgaggaaatggaggcaccaggagactaagttcttaagtgatgacttttggtaggaattttttagaaatgttttttaactgtgaggtatattgttccctctggaatggaagcacaaaattcaacttgtgtttatgacgtaatgacctagaatgccaccttccaaaaaagcagatagatagtgaaataaggaaaaattacagtttaccaacagagaggagttttgagggcctgcagagatgcagatttgacaggcaccaaagtagtcttcactggctacttattcttacatgaaatttcagattgaattaaatgttaaaggcaaagatagagaactacatataaataaaatttaattttgcttaagacttaatttgtgtttagaaaattaaatttaaggcagctgccaaaattaaggagcacattgctctaaatgttttttcctttggtacctcagagaagtaagattcttctctatcaacaaatttgagcagtagatggcatcctttttcacagggatttcttagcagaaacacctgttcaggcaagaatatctttcagcttcttttatctttttctacatgttcagaagtatacaattacacacaaacaccttgatttctagatacaaataacatgttttttaagaacacaacagcactttacctgattttctttatcaaagcagcaaatgttgatggagatttcatatttataatataccttataggccaggcatcgtgggtcacgcctgtaatcgcaggacttagggaggctgaggtgggcagatcgcaaggtcaggagatcgagaccatcctggctaacatggtgaaaccccgtctgtactaaaaatacaaaaaaaagttagccgggcgtggtggcgggcacctgtagtcccagctactcgggaggctgaggcaggagaatggcatgaacccgggaggcggacgtggccagtgagctgagatcacaccactgcactccagcctgggtgacagagcgagactttaaatttaaaaaaaataaataaataaagtaaaaaatatatataccttataacatgcaattagtactaaatctaaatataatattagaccttaagtgtactggacaagttttttctaaagaaccattgcagaaaatatatagactattttcacaatgtgaatcatcaccccaaatttgtttccttaatttgaaaaagggcaccttacagtaatagcaaacagcatgttactgacaatgtaaaaataattaaaactttaccatttatgaaaataattcttaatcacatagaagaaaacaattttagggacagttcattatcaaagacctggaaaactgtcctgttaaatgtattgagtgcagattgttttgtttctttacaggtagatagattttggtcattgaaggtcctcttcattcagtctctaatgagaatttttagtgaaaaatgtccgatctcattttgtaaattgaatgcacgctaaatttgctcttttactaacagcataccttgttgcatcagccttaggagaaaatctgcgtgcacacgtgtgaatgtacacacacacacatacactgtgaacccttggtaattgccaggatgtccatttgagcaaagcccttgattaagtacttctggatacttgacaaacacgcagctattacattgcctaggtctcatgaaaagagctgatattcttgttggatgattctgtttgaacagtagaatctggtataacaattttgggaggcaatagaacttgcagtgtcagagtcttgagttgcagtactcttcattatcagtcccaacattgacatatatatattgattatagcaaacaatttaaaaagccacttaagcaatttttttttttttttttttttttgagacggagtctcgctctgtcgcccaggctggctggagtgcagtggcgcgatctcagctcactgcaaactctgcctcccaggttcatgccattttcttgcttcagcctcccgagtagctgggactataggtacccgccaccacgcccggctaattttttgtatttttactagagatagggtttcaccgtgttagccaggatggtctcgatctcctgacctcgtgatccgcccgcctcagcctcccaaagtgctgggattacaggcatgagccacggcgcccggccccaattggtttttaaataaaatagacggccatcatctcataggatattaaatactaccccatacccctgaactcctgaatgatacagacccgagtttaaattccagccctgctatgtgcttctgagcaagttacttagcctctctggctgcttcctcgtctgtaaaataaggttgacaataattcctaactcagaggtatagtatgagcattaaataagaaggcataaaaaagctcttagcaaaattcctggaacgtagtaaatgtcagtggtagctttttttttttttaatggagccaggatcttattagagagactttatcagcctgtctcaagatgaatcaccttatggcctcaacaatgtatccttaaaataatgaatataataagccatataatgagatacagtcctaaagccgtctctcttctaacaccgtctcccacctctccccagaaacttgttagtctttctttgtacagacatgtgcacacacacacacatacacccaactactgaaaatatctaaaattctcaaaggatttccttttgttcttcatgcagtcctcattatcatagtttcaaatgcttaccaaaaatttgttgtttttcttaagaacaatcagtgaaatccagaggaggttctgatgcccattttttaaatttacattgaagaaaataagcatatcagagttttccaatgtgctgtgatttgccttaacaattttttattctttggttttcacatccacaaaacctaaatgaatggctaggctgaaatgaagctgttgttacagaattgtgctcacagatcgtgaaatgatctggctggaagcattagcgttgatgacatttgtgtttgttctactttttcctgactgcctgagaagggcagccacaaagagcagcatagcatgcagtgactgccagcaagtctttgtggccaacagtctgcctctttgtagataatacctagatataatatgtagataaaataatatttttaaagagacaaagcaggtcttataagacttgtatggatgtatttgcaaaatgtgaagctgccttctagtatatttttaactagctttatagaggcaatgaggaagccaatttaaatgttgaaatttagattaaataaatatttcattaaacttacaaaccagttcttgtcagcctcttatctatatgtaaaactggtgtactgctgattcctcattacctttggcctggtagagagtttgtacaaggcagcacggttaatagttgaggtttattacaaagaataccagaagtaacagactcaaaaatcccagaggtctgaccattctgtttctctcctcttacagcaaaggatttgattcaaagctactgagagcaagagaataactcatttctgcttacattttattttaactctattaaaagttaaagctaagataatgtatttcttgtttttaaattactaaacagccaatgtaagatgttttttagcacttcattgatgaagttactgtctggttaagtaaaggtcaattggaaaaattggaaagtatttgcagtggattgggaaataacacactactttgttttgttggtgtgtattcttttttttcggcaatgatatcataattgccttttaaaaaacttttaatgtctgctccctgagctacttattttttgagcattaatttatactaaatcagcttcaatcttttaaagcagattagggtttatgtcactgaaactagttttgtttaatcttcctaaaaaatagggttagggttttattattgtttttaaataatacatgcctatttaaaaaaatagaagaagaagaagaagagcggggagaggcagagaaacttataggacaatatcatttgtaagtttctttcacataagtatacgcatttgaaccctggaaaaaccatttactttgtgacacaactgaagttcagaaagaatgtgattagccccagatcacagagaaagtaagtggtgacattagcagtggcccgtgggactaccagctcctcagcctgcatttaaaccacaggtacacttaacttactgccccgagttgcatatacattttctaataacgtaactattgatgtatgtgctcaccaccacttcaaggtacgcgtttgccctcgtgcatgtggtctgttgtgttcttaactgcagttgaagcactattgggtccctcatcatcaggaaattctcacaaagtacaatgacctttcaactaactgcattttacaaggagtaatacagttactcattacaggttgctgcaaataggaaaaaaaatgaagtatagaaaaaccaaacctcattgtcgaaatgtatttgggagttgcagaaggaagtgaactatgtcttcctctaatgcactagtgaaatactagagaatagtcactctcgcatcagtagttactatggaatatttaatcataggatatttaatcagtgcagttctgtagtatctggtagggtctcaaacaggctttaaaggttacttatttgttcctcaccataattagaagatgcagatgttaacatttctgtttccatatggagaaacagccacagaagtggcgcatcccaaggccacagacattgtaaatgttgggcccaggcctgggattagatgcctcaccctccttttgactccaccatgctgccagtctctacatgagaaaggaccaaatttttatttcatccaaatatcctagtgctcccggaaatattttcttatattttggagacttggcttactgccactttttttctccctcactgtttctattaacatgtggcatccaaaatcgatttggactgagaatcccacctttgaatgcctggcctgtgtgcatcagtaagctggatggttttgctgaaattgttagaagccatttcatcgagcacaccgtgtctccttcagcacctgtgctcactttgtcttacctttttccctttacacttgccaccttaccaaagcagcttccccctgcacctacctccgtggcttcatttaccctatgaccattattaatcctaaaaacttcacttttgtccccattccttgtttcttcaaacgccagcgtaaaacaaggaagtattttctgagcatcagaagtgctttggaaaggtcagatgatggtgaggaatatcatgctgtccacactgctttctttgggtcggacccagaacacataaaaagggaaaattgtgaacaatggcaaatataaaatgaaatatcctcatttcacacgtttcagctgtatgtcatctgtcaaatggaagccagcctttttgaaaaagtgagaaaaagactgcggtttccctcttctgccctcatactaaggacaaatttgattcactcactaaatggcagattatatagtaaaactttgctctcctgataaattcatatttgcacttcccctggaaatttaacagagtccttttgtagttaattaactgtaaaataagataagattgggcagttgtaaaaggaagtatctttaaggttttctgctaggctgggaatattttatttctaatcaaaagccaagaaactatctctaaactagctcagagggaaatccaccctccccacccctcttctttgatgttgctgcgtatcctggtgagggcttttattagaaaactaaggagcaggactggcacatcaatagcgataagccatttaaagtggtgcccctcctggtcctcgatgctcgggattaactcactgtggttcttttctggctgctccttttttgtaacttgtttattgcatatgcttttttccctgctcgactatgtttgggagccacgacttaccatcttgatttgtcttgtttgctttctgtgtcccttgcttcctgtgcccagttgagcctgttgatgcccgccctgctgccgaccgaggactgaccactcgaccaggtatcagaaccgcttgacttgtgcctctccgcatcttgggcctaagctcgagcagacgttgtctcctttctgcattttaagcctctctcaattgtacttactgcagagtagaatttgaagtgaccttagaaaccaaacttttaaaaattccccttgactattccttactcttcatttcccaagttccgagtgaaatgattttttttgtttctgagctttccctttgaaacctaaaagagagcccttccaaatttgggtttttttttttcttttttctttaaaacaaacaaaacaaaacaaaaacagagacgattatatacagcctgtccttaaaaacagaagcccagatagatgtagactctcaggtgatgacttggataccagtgtgaacatctctcctttcttgtttggtgtccagatgggtaattttctaactgaactgggctcaaacttcaatcagttactgaagtagacatgatttcctgaaaataccagaattggtttctttccagagcccaaaatacatcttctgttttgtgggttgtatgtacttattctcaatgagtggctaaagtaacacaacagatgtggatgcataattttgcacataagccctttttttatgtattacttaaaaatcccattaacactgaaatagacacttctttttttacagtttcacaaacattaagaagaaacacatttttattttatgaataatgtcatagcacagcagaagcatatatgtgcctggtgtctactctatgaacaacctcacccaactgatagtagccagtgctttcagtgaatcaaaaagaggaagaaagttattgaattgacaaatttgtgtattccagggagattttaatcccaaataacacatacttttccatatttattttcttctttatcctcataatgtccccaggcgatagtcaaagaacagggaattaactttctttgaagatattaatacacagaggtcaacctttgctgcctggttcagatacagtcagcagcagaccaggagacccaccctgtccctcacacttccaccacaggctcgagccatgactgcctccaagcacggtcactgatgaagactgagagtctgcctgtggcatcttcatgcctttatgctgtgattaacagtggcagcagagacagtagtgtgacacgtcttgacagctggtctcgttgatttatgaatttctgtctgtaggcttttaaggggaacttaaattatagtgagtcagagacagtttcagttcttctaatgtcctccttattgtcaatgtcatgtaagggaatctcaaggagccaggagttgacattcctgttctgctcagccaacttgtaaggcctcgggctgagggtcagttcagttctaattgcaaccacagccagctcaggttggtcatttgccttgggacttttttcatggtgcttctctttaaaagacatgctcttcatctacaagcataaaatgtaacttagaaagcgctcattcgactcattcaattttatcaaatttctacattgggccaggagagcctatatgttactattgaaacatccaggaacaggtgacactaccagtcaatgtttttttcttttttaaaaaaattgttttttgattttttttttttttttttgagatggagtctcgctgtgtcccccaggctggagtggagtggcacgatctcaactcactgcaacctctgcctcgggggttcaagcaattcttgtgccccagcctctcaagtagctgggactacagatgcgccccaccatgcccagctaatttttttgtattttcagtagagacgggatttcaccatgttggccaggctggtctcgaactactgacctcaggtgatccacccacctcggcatcccaaagtgctgggattacaggcataagcaccatgcccggcctattcttttaaaaaaaattttttttaatctaaatctaacaaaaaggacacctccaaacgctgtcaaacaaaaacagtgtgttttaaaggaagagctagagaatagttaatggtattacactggtgggagaaaaccatccaaaacctttctcataacagtaagaatatgatgtcacttggggatttcacaaagatcaatccactaaattctttctaggtttgaaagaaattaaacggtagggtccctgctctcaggagcttgaggtataatagaaggaattttgcatatttggaaacatgagatggaatttggaagacaaggaaatacaaagcaacattaagtgctaacaagaatgttctgtgatgggaggagatggagtactaacccaggggcatgttaagtagagaacttactggagatgggcttccagagaggttatgaaagatttgaggcacctggattggcaaagaagaagggaacaattctattcagaagagagggtggcctaagccaagcttcctttcatacacagcgtaggcttgggttgcccagtaagatggctaaagttgagaaagaatgctcagatatgaagtgaggaagattctagttaaggtttgtctatgaatagcagtatttactgcacatgtattaagccatgcgtgtgttctgtttttgtgcttgtagtaagtttatcaaacatttgggctaatttccccgtgttttgtagcatagctttggttcttcttcacattttagagaccacccacttgagtctaatgtgccgaattatatctttagcctttccaaacttagaaagccttcccaagattgtcatgccgttcaagtgatggcattgtttttgaataatcactgttgtcctcagaaacaagttaaaaaaaggtttttgtttttcccccacccagtgctttataatcatgactgaggaaaatggcttctccttaactctcatatctaaaaaaacagaatatggtagcttccagcatgcagtgtcaagtagggaccattgtaataacagtggtgatttgggggcatagtggccattatagctcctcctcctggcttacttccaaagaaaaaatagactctgaaggactaattatacagtttgaccagaataaaaaagaaaaacacattagcgagctcttcacatagggtagaaagctaccctttctgttacaattcatcaccacccttctgcagtccaaataaagggaaaccaggtccttgacccgagccatgcaagaggtgtcatgaaggacatacctcccttagcccccacatgaacaaaaggctctgtccactcatcatgacttacaggaagagagagctggagtcaccagggcttagggtgaaatcagcacaactcaagaaagacctctaagtaagcctgcaaaccaaggtccctgccatttatttgaaactactcatcacattttattacatgcattatcaccttattatgaatatttccctatgtgccagcttactgattttgtcttttagtaagatttgcttaatgtaaaaagtcttccctagatgactattcatgctaaacaaacatgaactattatagcaagagctcttctgccaagagcttctcaaactattgagctgtaaacatgaatttatctgtcatgctgacttgataatatgaatttttttttttggaccaccaaaagtattcacagtatcatttcaaaagtagtgtgggcttgtaaagtttttagtggagagctcttggttttgttttttttttttttttttttttaaaacaggatttgtctctgtttccaggctggagaacagtggcatgataccagctcactgcaacccccatttcctgggctaaagctatcctcccacctaagtttcccatgcagctgggattacagggatgtgccaccacacctggctcatttttgtatttttagtagagacagagttttgccatattggctaggctggtctcgaactcctgagttcaaactgtttgcccgcctcagcctcccaaaggctgggattacaggcatgagtcactgcacctggccgagagctcattctttttttttttttttttgagatggagtctcactctgtcgcccaggctggagtgcagtggcacgaatctcggctcactgcaagctctgcctcctgggttcacaccattctcctgcctaagcctctagtagctgggactacaggtgcctgccaccacgtccggctaattttttgtatttttagtagagacggggtttcaccatggtcttgatctcttgacctcgtgatcctcccgcctcggcctcccaaagtgctgggattacaggtgtgagccactgtgcccggccagagctcattctttacttttatttttcagtataaatatttggctccaaaatctaaaagggaagactcttcaaactgttcaagaaagttttcttaaaaatctcagaaatatagttctaacctattgtgttgctagatcttttatttatttatttatttttggagacagagtctcattctgtcacccaggctggagtgcagtggcacaatctcagctcactgcaacctccacctgccgggttcaagcgattcttatgcctcagccttctggagtagctgggattacaggcacccgccaccacacctggctaatttttttttttttttttttttttttttttttgtatttttagtagagacagggtttcaccatgttgaccaggctggtctcaaactcctgacctcaagtgatccacccagcttggcctcccaaagtgctgggattacaggcgtgagccaccgtgcttggcacgttgccagatcttaataacagaaaaggagtgagctctaaagaaatcactggttatataaggatctcagatttaaaagggctatagaaagattaaaatatacagccagtgagaattaagagagttttagcatcactaccctataaaaataagtgtcagaaaggttcgtttcagcagaatgagttgaaacttaaccaaaaaatacttaacaatattaaagtaagaaaataaataagaatagagaactctgtgggtctcgtagcaagaagttgggggttgagggttaggtcattgagaggaccagagttaaagaatgagaaagggaaactgtcccacttccattgtgccttttatgtctatattaaagagaatgaacttctgatgaaaggaaattaaagcccgagatagatcaacatgagaaaagaaagccctagcccattagttacctattgctacgtagcaaataacgcgagaatttagcagcttaaaacaacaagcattagtttcttacagtttttataggtcaggatttgggatgtggtttagctggatggttctggcacagtgtccgtcatgtggttgcagttaagacactgcctgagctaaagtcatctgaaggtttgattggacctggtgggtctgtttccaacgtggctcactcacgtcactgttactaagagacctcagtatcttaccatgtgaactctgtaatgctgcttgagcgtccctacaacatggcatctcgcacccctgcaccaagaggtccaggaaagagattaaggaagttttagtgccttttttggcccagtctcagaagtcatacaccatcacttctatcatgctctgttcactagagcaagtcactacatcccgaccacattcgaaggaagggaatcaagttctccctcttgaaggaaggagtatcagcaaatttgtggatatattttaaactatgacatcttgctacccaagtccaagttcttatgacccagaccaactgcaggctaagagaacttgaaggggaagtagcaccattgcctgtggtctttgtggaaagctgggaaggtagggataggaaaatgaagttctgaatagcaaaaaggagagaagatagcttcacaatctgtaagccaggtatagagtgacattgattgtgggtctcttttcaaataggttatcaagtggaagctttttgaacaattggatgaggaaatggtgctaggtcacaaccagcgtggatttcctaggttttgtcagattatccttaccttctccttgtataggctgtgctcttagactggcacatcatatgctgtggacattgtgcttttcagtgtcagcaagatgtgtcacaagtttcccagaatctcgtagacaagattgaaagagtgattaggccaagagcaggaagtgaattcccctgggagccaaaggaattgggaatgtgtagcccaagtaagacaagaaccagcaggaacatgcctctccttagggtcgtgatacctgttcaaggttttaatgtggaagggaggattaggcttgctctgtgttgaatcaggctcaaaggatggaagttacagggaagctgattctggcttcatgtaaaaaaaggacagtttgggcaggcaaatctatcaaaaaatggagggaaattgatacattcctctatgttcaaacaggaactgacaatctgcccctgggtgggaacacggtagagaagatgacttcaaaagcccttttcatcctaaaattctgatgtttgataattaaatgttatagcatggacactgacatttacattttttacttatgtttttggtttttaaatgactctgcattttgttttaagcttcaaattattatttgaataatgaaattcatcagaacaattagtgttaagaatcatatagcaatttatagaaaaggaagagttcgtaggttataaattctgttagttgctaagaagcatttttaaaattatgtactatagctctttattcagcagacgaaccaattacaatctgtgtaactagaacacttgactaaaattatataatttttacaacgcttcactgcatagatacatgaacataatttatttgtaattggaacaaagccccaaagtagcagttttgttctaccaggtaattaatgctcatttttaaagccttttattattatttctgaagtaatgagtgcacatggaaaaagacacataataggctaaacaataagcccgtaagccaagccaacatattccaggaacaaatccttgccaacctctcaaccaggatttaacttctgcttttcccccattttcaaaaattatagcatgtatttaaaggcagcagaagccttactttcaggtttcccttaccctttcatttctttttgttcaaaataggtagtaattgaagttttaaatatagggtatcatttttctttaagagtcatttatcaattttcttctaacttcaggcctagaaagaagttttgggtaggctttgtcttacagtgttattatttatgagtaaaactaattggttgtcctgcatactttaattatgatgtaatacaggttctgggttgacaaatatcaagacggaggagatctctgaagtgaagatggatgcagaattccgacatgactcaggatatgaagttcatcatcaaaaattggtacgtaaaataatttacctctttccactactgtttgtcttgccaaatgacctattaactctggttcatcctgtgctagaaatcaaattaaggaaaagataaaaatacaatgcttgcctataggattaccatgaaaacatgaagaaaataaataggctaggctgagcgcagtggctcaagcctgtaatcccagcactttgggaggccaaggcgggtggatcacgaggtcagaaattcgagaccagcctggccaatatggtgaaaccccatctctactaaaaatacaaaaaagattagctgggtgtggtggcaaacacctgtagtcccagctgctggggaggctgacgcaggagacttgcttgaacccaggaggtggaggttgcagtgagctgagatcgtgcctaggcgacagagcgagactccatcccaaaaaaaaaaaagaaaagaaagaggctgtatgtatagttctttcagactacaaggcagcaaagttcgtgcatgactcgggacttaaagtggaattaatttcaatatagcagccactttgacttccactgtgttttctgggaaaataggtttacaataggtttatttgaaggatcaaacacatgcatacactgcttggttttacagaacactttatgtggcttaaattcacatccggaactgtcttcctttacccattcatttctcccccagctctttcttttcattccctcccctacctcccatgatttaacttctcttgcaagagtaagatcatggagtgagcaggaccccatgatgttcccgatagtgttattcatcaaaaggtttgtgcaaagaagacagcagcttccttttcagatgaaatcacttttcccccctaatgttagaattggagtaaatcaaaaagccacatctcctttgtggtcagctctagtagttatataaaatcctttaccaaaagcttagaaatggagataaatcaaatcgtggattatgttagggttccatcttatcagtaggtgcagtaagagggttaaattaatgaagacgacaattttatcacattcagtggtggacagaaaaatggtaagaaaatttccatagcaataatacttaaagttatctcaggcacttcttttgttttgttttgtgtgtgtgtgtgtgtgagtgttacttttttccaagcagaaaatgtcttttcaatattcataaagttgataaatcctagtattaatctctaaaagaaacacctccaaattattatttatgccttacttgactccaaataattgtagcaaataaaaaactgacttgggatttggatttgcattcttaactcccatagttctttttttgtagaaagacatttagctttttgaagcatggttttcattggcaagataatctagtatcagttgttataagatcagggtttctcttgatgaggctgttgctgaagaggttaataaaaactggggaaccactaaagagttgaagagttggtggggtagaaagctgacgattaatgtacagatttgcatttgtcggggcctggggcctgtgtcatataagcccatccccacaattacactaacgcctataatgcgacagtgactaatggcagcggcagcaattaggagaatcagctccctctactggactagttaagataatgtattataattagtgcaatgaatattacaaaattacagtattttcttaaaggcacaggcatatgtccagacttgtatttattcctgattacctcacactagtatattagctaattaatgatttgcttttcataaaaatgttgagctagcatatttgtttagtaaagggaataattatgaacaatttctcattttgttataaaccacgagtaaaacacttttagaagttgcttcatttgctatattttatattgcctttccagattgctagtatgttagtttcagcttagaaaaatcagtcatttgactaccttgaggctaaattgaaagaattttttagggaggtacaggcataccttggaaatttcagaacaccacaataaaacaaattttgcaacaaaatgtcacacaaattttttggcttcccagtacatataaaagttatgttggccaggcacggtggctcatgcctgtaatcccagcactttgggaggccaaggcaggtggatcacaaggtcaggaggtcgagagcatcctggccaacatggtgaaatgccatctctactaaaaatacaaaaattagctgcatatggtggcatgtgcctgtagtcccagctactcgggaggctgaggcaagagaatctcttgatcccaggaggcagaggttgcagtgagccgagatcgcactccagcctgggcaacaagagcaagactctgtctcaaaaaaaaaaaaaagtttgtatttacactatactctagtctgttacatgtgcaatagcattatgtctaaaaaaaaaaaaagccatgtatatactttacttttattagtaaaatattttattactaaaaatgctaatgatcatctgagtcttcagcaagtcctaatctttttgctcgtggagaatcttgccttgatgttcactgctgcaggctaatccaggtggtggctgctgaggtttgtggtggctgtggcaatttcctaaaataagacaataatgaagtttgctgcatcgattgactcttcctttcacaaaaagatgtctctgtagcatgtgatgctgtttgatagcattttgctcacagtagaacagctttcaaaattggagtcagtcttcgcaaatctagccactgcttcatcgagtttatgtgatatcctaaatcctttgttgtcatttcaacagtgttcatagcatcttcaccaagagtagattccattgcaagaaaccactttctttgctcatccataagaggtaactcctcatccattcaagtttgatcatgagatggtagcagttcagtcatgtctttaggctccacttctaattctagttctcttgttatttccaccacatctgctgtgacatcctttactgaagtcttgaactcctcaaagtcacccatgagagttggaatcattgtcttccaaactcccgttattgctgatgttttgatctcccatggatcacagatgttcttaatggcatctggaatggtgaatcctttttagaaggtttgcagtttactttgcccagatccattagaggaatcgctatctatggcagtgaatagccctacaaaatatatttgaaatatattttgaaataataagaggctgaaataataagacttgaaagttgatccacaggctgcagaatggatgttgtgttagcaggcatgaaaacaacagtaatctccctgtacctgtccttcagagctcttgggtgactaggtgctttgttagtgagcagtaatattttgaaatgagtcttttctgagcagtaggtctcaacagtgggtttaaaatattcagtaaaccatgctgttaagagatgtgctgtcatcccagttttgttccatttatagagcatgggcacagtagatttagaataattcttaagcgccctaggacttttacaatggtcagtcttggcttcaaaaacaaagtcgccagctgcattagcccctaacaagagagtcagcttgttctttgaagctttgaaggcaggacttctctctagtgatgaaagtcctagatggcattttcttccaaataagtctgtttcatctccactgaaaatctgttatttagtgtagccaccttcatcaggagtcttatctagatcttctggataacttattgcagcttctacatcagcacttgctgcttcaccttgcacttctgtgttatggagatggcttcttcccttaaacctcatgaaatcaacctctcccaacttttttttcttctgcagcttcttcacctctctcatccttcatagaattgaagacagttgtgggccttgttcttgattaggctttggcctaagagaatgttgtggttggtttgatcttccatccagacaactaaaagttttctccgtatcagcaataaggctgttttgctttatcatttgtgtgctcactggagtagcacttttaatctccttcaagagcttttctttgcattcacaacttggctaactggcacaagaatcttggctttcaatatgccttgcccactaagcttaattatttctagcttttgctttaaagtgagagacctgtgactcttcctttcacttgaatacttaagaggccactgtagggttatttactggcccactttcaatattgttgtctctcaagggatagggagcctgggagttgagggggtggagtggccagtttggggggcagacagaacacacacaacatttattgatttagtttgctgtctttatgggcatgtttcatgacactccaaaacaattaaaatagtaacatcaaaggccactgatcacagatcaccaaacagatataataatttttaatgtttgaatatttaaataattaccaaaatgtgacacagacatgaagtgaacctgtgttcactgttggaaaaatggcaccaatagacttgttcgatgcagggttaccagaaacctttttgttttttttttttaaatactatctgtaagcactactgtacaataaagctatgtatgcctgtattttcattaagttgcagagcaaacgtggtaatatttagctttagttttacttcatctggcataagatcaactccttatataacaagatgataaaagttgtggtgtgcttctataatttcattcaagtagataaagttgaaaaataatgacttgcttttataaacagtatgaagcaatgtagtgcagtaaatgaaattttattccttctttacaatgttctcaaaattatttttatgtttaatccaaataaagagcaagaataaagcaacatttcagattttggtttctggagacaatagttagaaagcatgagttatgagtgacttaaaattcttgttgcctgtacttcactttgaaataacattatgctttaaaaagcattacactgctaaaggttaattagaattctgcagaattactatagctaaaagtaggtaacaagatatctttttttctattgtttaactcctttgtttcagaatgcctattcctgtgcattaaaagtgtccctccaaggaaattaggacatctgcagagttgaaaaacacctaagtctcagtcacttagagtcacacatcagggctcagagtgctatgactaggaaaatgctgacctcctttcattagtatgatcgtgcctttccagcttttgatagatccaagcgctatcttcccaccactcaccaaatgttccacctgtcaaagggtttcaggtccctgcagacttcggttttgacctgtggggaaagtagacttcctcgaactggggaagccacatgttgtacatccttctataaactatgattatcattcttagtaggaaaatatgtgatttctttttttttttttttttttaaagtaagcatcaaatatttgaccaaccagttgggcagagaatatactgaaactttttatataacctcatccaaatgtcccctgcatttaagaaatgaaattcttctaattgcgtttataaattgtaaattatattgcatttagaaattaaaattctttttcttaatttgttttcaaggtgttctttgcagaagatgtgggttcaaacaaaggtgcaatcattggactcatggtgggcggtgttgtcatagcgacagtgatcgtcatcaccttggtgatgctgaagaagaaacagtacacatccattcatcatggtgtggtggaggtaggtaaacttgactgcatgtttccaagtgggaattaagactatgagagaattaggcttagctttttgctaagaactagctaagtatctcttttaaaaaacgaatcagtgtgcttccatgatgcttgggttacagttgttctttcttgttttggttttcattcattgcaacttaccgtgaatattctgctcaaggtattgagagtgtgtgttgttatctcaacttacaatttgtgttgaagttatcaaaataatacaaatgataatgcatgactttaaaaaagcatgattactcttagacttttttttttcaaacacaagcaacaaaaaccagtacaagaagttaaaaataaaaatagaagtaggaagttgctttttccaaaaaaactaaacatgtttattcttggatttcttttgtcttaaatagtctggcctctcaatacaaccaggtaatagtaaataatgtgacttttcagtgcagactcttacctttaaagtttctcaggaaatcacactataccaaatggcccaccaaaacatacatgattgttatttgagagttctgcaacctattaccctgcacttccacctgaaatatcttagtttcaaggtgctatactaaaacaagaaagagagaaagaaaatttacgaataagttatttttatgcatttgaaatgccatttggatgggggaaaaagtgttaaaatctcacagtatatgcaactttttaggaaactgtcttgcagagagtatagtgtaaacataacttttatatgcacagggaaactgaaaaatttgtgtgacatttaattgcgatattttaagagttatggaatttttagagctgaaagatttattgatgatgaccaatcaaattgatcttctcatcttgtagatgagggaactgaggccgagacagaagggttcaaattatgcaaggtcaagctcagagtccagatttcccctcatattccccattgctttttttttttttttttgagacagtctcgcgctgttgcccaggctggatcttggctcactgcaacctctgcctcctgggttcaagcaattctcttgtctcagcttcctgagtagctgggactatgggcacacgccaccatgcccggctaatttttgtttttagtagagacagggtttcaccatattggtcaggctggtctcgaactcctgacctcaggtgatccacccgccttggcttcccaaagtgctgggattacaggcgtgagccaccgcgtctggcccccattgctttttccatcagagaaaagtccaggtgtttctagggagttgaagattccactatccccaaggaaatgggctctaaaccattcttgattagaagaggacaggcagagtttaaataaatgaaatttgtggtgaagccagaaatttcattttgctcagcaattaaaacctctgcagactacaacagaagctgctgatggaaattggggtggagcctcatttccccattcatactgacgtggatgagcagtgtgaggaaggaaaccaagagaacagcaggcagcagggtggaaaggaacggactgacccatagatcagagtgtgagcacataaaagcaatgaccccactgtcatgtttggccattgcaccttttgtgatagtatctaagcttatgtccctcaaaacagtgtaagataggttttcattagtatcagcttatttcatttctgctcaaattaatttttaaaaaaatttaattccatatttgagcaaataaagatgtcttcatacttgagtaattcaagaccccttttttgctgctgttgttgttttggtttttttcatggttttgttgttttcttttgttgttgttgtttctttgttttttgagatggagtcttgctctttcacccaggctggagtgcagtggcatgatctccgctcactgcaacctccacctcccaggttcaagcgattctcctacctcactctcagcctcctgagtaactgggattacaggggcataccaccacgcctggctaatttttgtatttttagtagagacagggttttgccatgttggccaggctggtcttgaattcctggcctcaagtgatccgccctccccaacctcccaaggtgctgggattacaggcatgagccaccatgcctggccttcaagagcactttttagtttatttaatataattctctttgttgccggtctgtccgttgaagttgccttctttgatgccagaggccaaagacttggcttcctcgggcttccataacaaagtaacacagatgggtggattaagcaacagaaatttaccctctcacatttctggagtgtaagatcaaggtatcagccaggttggttcctccccaggcatctctccttggtttgcagatgcctgtctgctccctgtatcttcacatgaccttcactctgtttttctgctgtgtcctaacctcttcctacaaggacaccagtcatagtggattaggatcaaccctgatgaccttgtttaactttaataacctcttcgaccctatctgcaaatacagtcacaggtggaggtactggcagcttaggacttcaacatatgaattctagggggacacgttttagcccgtaacagaccccagtgatgctgagcataaaagcaaggcctccacctggagctccttcccctggctgtgcgtgagaccaggtcctacctcagacctaaggaaaaagaatccccaaataggaggctgcgaatctgagtgttgaaaatttccccaaatgaatgagatgtgcagtcggatttgagaatccctgacacatcattttaacactccttccttttagttctccgcgcaagcctcagggagtggaaaatggtatctctcacctcccagataaccggttgccttttaagtgctcttccagctgcctgaattaaaacgctctttttttagtcagtttaccaagcagtgtctcattggacttaaaatgtcagaggagaagttgacactttgacccagattctgacattaatttttaagccaggaggtatccttgcaggagcaaaatcgggaaggatggctgttcagctcttctctcctcattttgctgtctactggagagcaactggaagcctttctagatgaggggctccacctcattcgtgtttgttttgtttatttcctctcagctccttcccctcaagacctttgtgactgtccttcctgaaagcagccctctgtgcagccccatagtgtgtctgtacagcaatgttgaaatagaccacattccgcttttctgtcctcaaaaaagatgtagtttagctgggatggtagaacctgaacacagggagttgcaacccagcctaggcatgttcccaggtgagagagcacggtgggctttcagagcaccatttttcttagcattccagcgtctgcacccacagaagtgatgcttctgcaacatcctcttcctaccttaacaggcactctcaccctcaagtacatggaaatacctttatttccggctctggctaaccttcattaatcagtaaccctacttcagtaagaacaaaaatgagtacatcaatatttccagttggactcacctcagtcactcaggacagaataccattgtacttacataccatcgtgcctgaagaagtcatgatgaaagctttggtttccaggagattttttgtttttagagtgaaaaatgcccgcagaagatcacagagataggaaccctaggaaaaaaactcctgagaacaaatgtataaatgaaacaagcctagaacagtcacataccacttcacactggagagaacgttctgagaaatgtggcatggggcggtttgatcgctgtgcaaacatcataaagtacatgtacataaatctagatggtatagcctgctacacacctgggctacacacctacaactattgctcctaggctccacacctgtgcagcatattgctgcactgaatactatagacagttgtaacacactggcagggatttgcgtatctaaacaaactagaaaaggtacagtaaaaaatacggtattatggggccaccatcatatgtttggtctgtcgtggactaaaatgtcattatgtggcccataactgtatttttattggtagagttgttagcatttggaaatgagcacttgctagttgttgtttttttttttttttttttttttcaaataagcaggaaatattgacttactgaatttacttagccataaggccagagagtcactctgtgagccattggccacgctttcccaaggaggtaactgtgccttattggtgcttcaagcagtgaagcaatagccctttattattaccactccccaaatgtgccctccatgtcagaatagccctctggtggctggaaatctcagcactagctgaattaaccaccttgctcctgttttaggacgttcctgcaaagcccactaatcccaggatctgtttagtagcaagcggtacttttctacattcacatacatagacactggatatttaaaaatacgtattgtagctctttctgctactctccccagacatgtcacctttaataaggagaagttgggggcacagcttctctttattataggatgtgaaaaagttttcctctcacagatctgatcacttgaacaccagaagtctccccgcccccacctcctggttatctcattaatgatctaaataagaagagagttccttttatttggcttttatggaggtatggcatatgactttttctaagtaatatgctgtcacactggtgactgtataaaaagatgtccttagaggtcctttcttcccggccagaagctgacccaccaggatacagacgcactgacgttggcattgtagagtagttggagagagtggtcaggttgaatggaaagccacgataaggaaaagtgagggggggtgcagaacctaggagtggcttacagtgagcagcaggaagagaaattggaagatcaaaggaaagcatcaaaaatgatcacaggccaggcgtggtggctcacacctgtaatcccagcatttggggaggccaaggcaggtggatcacttgaggctaggagttcgagtccagcctggccaacatggtgagaccctgtctctaataaaaatacaaaaaattagccaggcgtggtggcatgcgcctgtagtcgcagctactcaggaggctgaggcaggagaatcgcttgaacccaggagatggaggctgcagtgagccaaaatcacgccactgcactccagcctgggtgacagagcaagactgtcttaaaaaaaaaaaaaattatgaagggatagcaaaggagttcctgaacctgcctgaagaattgcttgatgttggccataaacatagtcaactgccttctagttatatataactatagagagatggcatcaaaattaggaaaacaagcatctatacaactaggtagcaggcagttactgggaggttacgagggataagtcactagcttgaaaacttcctattttctttgcttttattttttttttccgcagacttgtggctcctttgatgtgtcacactattgttgtattgttcgccttagttcccttaccctcctttactcgtctggtccatctcaatgacaggattctgtcgtttggcctgactcagtcccttgtataaaaggacatctattaatccacatcctgctggttactgtacataataaaatgtaaacgtggtgtttcctgcctctcctccaagctcacacacccgcatgtaaatactctaggggcaataggaggagacctagaaactaaggtcacccaaatagaatcttgtccctgcaggcggatagctgagctctaaattactctggatacagtgaaggactaaatggttccaatgaatcaagttcagggagaaaagggtcagggggtatggaggttagccaaagagtgtcaaacgttctcctcaaagctattttagaacaaggctggtcaggctatttgggctcagctcttttcagcgtgtgtcataggcagcagccagttgaagccatgccaccatgcagtgcaggggtccaggtctcaggaaggtgcagcgtaccgagagtcacatgaagacctcagatcatttcctgctgctgtgtaatccaggcagtctgggaagagaatgaatattcagtggttgtatgtatgtgtgtcttcatcccagcaagtgacagatgttcctgcccagttggaaaatggaaattctgacttcattgtcttatcattccttccagaacaagcaccatgggctcaaaccctccctggctctgctttaagggaaataatattgtgtctgtgcagaggccctgtctgcacagggtcgtggtagggctggccttcacatggtggcccatgccactgctgtagcttagccatgaggaagagattggtgagcctgctggagaggaaggctacccttacttggtgctcctcctttatccatagacatgagtactcagattttcgcatctagctttcaaggggctggagattaaagatccaatccatactccttggatgcccttttgtcaagataatcccttcttctgtagctcctaagccctctaaggtctgagggccaagctgccccatggcaggaatggcaaaatgtagctgtcctctcagtggcaaaaggtaataggattatcaagtagcaaaacagaagccaagaaaagacaggagagttagaggtctggattgtgcaccagccttggagcctcgcatctctagcagggcactcttaagcgttaggctttggagtttgaagaggagataaacctatcaaattgccaggtgttcccctgcccttgatgcatgcaaatgattgttgacagccagtgtgatggtagatgtgcctcctggaagaaataaaagtataatattccaacaatcaagcagcattgtggcttttttctacaatcagaaacatagcagctttgtgcttgatctcctaagcaagataattttttttaacctgggcattctttgagttctcagtttcgaggtgatggggagcaaaaatgatgcccaagttcaaatggcgtactgctgcagataggctgtctcctggcacacagatttacagagtgaatgaaatctctcattattggtgctaatctttaaccatggtttttaacttacaagttggaggctaattacacagttaccagttaaagccaggtgacctcatttgttgacaacagtgcacagcaaaggaaagaggagaggataaggaaaatatctgtgatttgctcccagaaggacagtgaagctgagcatccatttgagcagagtcctctgagtactggccttggtcagagcttgttggtgggagtgtgctaaggggagatgcctaggtctgtcattggagtaagctgagggtttggatgcaggggaactcaggcagctctgagccacagggtggtagatgggagggattcacagtggcgcacagtctcttccataaatggaaacgtaagaatcggggcacatggccatggcggctcatgcctgtagtcctagtgctactttaggaggccgaggtaggcggatcacctgaggtcagtttgagaccagcatggccaacatggtgaaaccccatctctactaaaaatacaaaaattagccaggcgtagtggcgggtgcctgtaatcccagctactcgggaggctgaggcaggagaatcacttgaacctgggaggcagaggttgcagtgagccgagattgcctgggcaacaagagcaagactccaactcaaaaaaaatgggcacataatggatggaacattctgtcccaagggatgagggagctgtatatctacctattccagctgccttgggattagccactggtagtcattccacctcactcccagactgaaaagagtcaatcacttcatgaagtggggctatccgaagggaccacaggggacctgattatactgacagatttatttttatttatttactttttttgagacagagtctccctctgttgcccaggccggagtgcagtggcacgatcttggctcactgcagcctcagcctcctgggttcaagcagttcttctgcctcagcctctggagtagctgggactacaggcacgtgctactgtgcctggctaaatttttttgtatttttgttaaagatggggtttcactatgttggccaggcgtgtctcaaactcccgacctcgtgatccacccgccttggcctcccaaaagggctgggattttgagccacctcacctggccttttttttcttggagatggagtctcactctgtctcccaggctggagtgcagtggcacaatcttggctcactgcaaactccaccccccaagttcaagccattctcctgcctccgcctgtggagcagctgggattacaggcgtgcaccaccacgcctggctaatttttgtatttttagtagagacaaggtttcaccatgttggccaggctggtctcaaactcctgacctcaagtgacgcacccacctcaggctcccaaagtgctgggattacaggagtgagccactgcacccggccatattgacagatcttttagtctgaattgttatcagccagtgtggtctagtcatgacatatctagctccatctcgagacctcatgtcttactgctgacactacatcctcgctggtactttttcttccttggcttcaggggcattgctgtgtaggctcagatccatgccagatggggtgtgtagggggaaaagctgcataagggaggaatgtcacttggcaacactcaacaagggggaatgggcctgcagtattctcccagagatgaatgagcagcccattctaggaaatatccctttgaaggaatatcttctctatggtacatccaaacttttctctggaaaacatgcctcttcattctgatgactttctatttattctcttcatcttaccatggttttacaaaagaggaattttaacatactcattcagcagagttaaggacctcctctcttctgcgaacggggagaggtataacaaatatagtaaaacaagaacagccactgcccacgttgtaggggtaagtaccctgcccaacctgcagacagtaaatgccacacacagctctaacagtgacagggggagaaaaacgtcttcagttactggcctgaccttagaggtaaagcaacatattaacagagagggtctgattttaaactttgagctgaacatacttctatagtatcttaattctcagtttttaaaaaattacatcatctagaatggcgtcgtccttgctcttccttttttcttgtgccaaataatagccccctttggtatatgttattgttttaattgattctcaaacctctccttaacattttaacaaacataaaatttgatagaaatgggctagactaaattcagcagtccaggaaatcgagtatttttctacacagatttgagtgtcacccaagatacagtatactttgctgaatctccctccatgatactcttgtggttttatctattttaccaaaacacttccacgtaaaacaggcttccgttgactctgtttgtcctttatggacccaacaggggaggaaaaaataccattgcactgggtttatccacttactgtggagttggggaaccagaaacaaccactggacacgttgcaagcgcgtcaaggtttccaccgccacctggtggctagatggagcacagcatctgtgtaactggtgggcaaaggcgttctgctccaagatgtcaaagtgggggagaaaattatgggtgttctgcaatcttggcaaaagaagagtactgtactccttatctttttactgcttctccatgttcacccttaaaagattgatttttattttttactcagctctcctcttgtttttcaggttgacgccgctgtcaccccagaggagcgccacctgtccaagatgcagcagaacggctacgaaaatccaacctacaagttctttgagcagatgcagaactagacccccgccacagcagcctctgaagttggacagcaaaaccattgcttcactacccatcggtgtccatttatagaataatgtgggaagaaacaaacccgttttatgatttactcattatcgccttttgacagctgtgctgtaacacaagtagatgcctgaacttgaattaatccacacatcagtaatgtattctatctctctttacattttggtctctatactacattattaatgggttttgtgtactgtaaagaatttagctgtatcaaactagtgcatgaatagattctctcctgattatttatcacatagccccttagccagttgtatattattcttgtggtttgtgacccaattaagtcctactttacatatgctttaagaatcgatgggggatgcttcatgtgaacgtgggagttcagctgcttctcttgcctaagtattcctttcctgatcactatgcattttaaagttaaacatttttaagtatttcagatgctttagagagattttttttccatgactgcattttactgtacagattgctgcttctgctatatttgtgatataggaattaagaggatacacacgtttgtttcttcgtgcctgttttatgtgcacacattaggcattgagacttcaagcttttctttttttgtccacgtatctttgggtctttgataaagaaaagaatccctgttcattgtaagcacttttacggggcgggtggggaggggtgctctgctggtcttcaattaccaagaattctccaaaacaattttctgcaggatgattgtacagaatcattgcttatgacatgatcgctttctacactgtattacataaataaattaaataaaataaccccgggcaagacttttctttgaaggatgactacagacattaaataatcgaagtaattttgggtggggagaagaggcagattcaattttctttaaccagtctgaagtttcatttatgatacaaaagaagatgaaaatggaagtggcaatataaggggatgaggaaggcatgcctggacaaacccttcttttaagatgtgtcttcaatttgtataaaatggtgttttcatgtaaataaatacattcttggaggagcaccattgtgctggtgtgaatgattccatagtaacaatcttgaccatttactgacgtacagaccagtgagaagtcttcgcatgttgggtacccacacctgttgtgtcttaattgcaagtctgagtaggaagttggggccaacatgtgtctcccagtgctgggaaaatatttcatagacctaatttacagtctttacttgatctaaaacattttgctgccatattttggccctcaagtttgtcccaaatgagagacaaagggaaaagttccagggaaataaaaattaagacagctgattatctgtaaagcatggtttctcatcctgaacgctactaacattttgcagggaataattccttgttgaagggagttgtcctgaccagtgtaggatatttatttattttatttatgttttttgagagtctcgctctgtcacccaggctggagtgcagtggcacaatctcggctcactgcactccagcctgggagacagacgagactccgtctcaataaataaataaataaataaataaataaataaaaggagggcctggcacgaatgacatgcagggaaggcagtgagcaggtggaggtccctgtactcgttgtggtgccttatctaccaggcggttgagttgacgtctttgtggacagaattcgattacaaaggtgtccgaaagtctccaggtgggggagagttttgtagcgggcataatttgggttgtaaattgactgttgtctcctgagcagtctcctggtgagggagagtttcactggagctttgaaacacatgttagacagccttgccctgtagggagtgtctcgtgaaggagaggtaaacaattataattgcatttctaaagggctaagtaggacatgggaaactggaaaatggagaaaagaagagaaaaaaatagtaactcattctctttttcttagaaaaatgaggatacttggtcacatcctcacatggtgaagaataagatggtctcttcatttcccttcaacactagtcccatcgtgaggctctgccctcatgacctaatctaatcctaactgcctcccaaaggtcccacctccacatcccattattggggattagggtttcaacatagggatttgggggaaacacaaacactcagttcatagtgatatctgactgcgattccaaaggtctgaggacacattggccctgttgtttttgctgtgttgtccttggcctcaggtgaacattttagctttagattgcaacattttaagctaaaaacactaagctagaaaattaaacttatctcgtcacattctgcatggtgaacaaactcaaaactcacctgagtgtatcttgttttcatgagaaaaaatgaccggtcatctcccttgccctgttagggacagttagacatgactgctgtatgaagatatgtacatgttaacaattcatatgtacaagctactgttccattttgcctggcccaaggggaggtagctagctagttggggtagcagggcgaattaaccctaatataatagtacatttctaatgccaccaatgaaatgaaaaccagctctcaaacatggcactatatgggatggcattccaaggccaactcagttacagtaactacagctttaactttgatcattttgttaccagaaaggggtcccaatccagaccccaagacagggttcttggatctcatgcaagaaagaattcaaggcgggtccatagaggaaaaggaaatgaagttttaaagaaagtaggaaaataaagagtggttgctccataggcagagtgaacctaagggctgctggttgcccattttattgttatttcttaattatttactaaacaagggctgaattattcatgcctccccttggtagaccatatagggtaacttcctgatgttgccatggcatttgtaaaccgtcatggctctagtgggagtgtagcagtgaggacaaccagaggtcactctcattgctatcttggttttggtgg

SEQ ID NO: 743 - DNA, 32674 bp, Homo sapiens
aaaaaaaaaaaaaaaaaaaaaggtacagacaggaccgtagaggtcatggaaacggtgggaagctatcataaatggcaaggtgtggtccttgtagtcatccccaatatatggtttattacagtgccctgtcagtctgaaacaaatattcagtctgcttcgtgtgtacgttccagatgtggacatggatacaacagagcttaatgcattaaatatttgctctgattgtatactcaccaagtctattctgactaattcaaagagtcctatgtcacttgcatttttggagagaaaacactagccaggttgacatgaatatgcagactactacatacttatatatctcactgtaaatgaacaaactgctgttcgcaacattaagatcttatgagtttattattttgggttgatgtcacccagttggattaactctcggatgctgatagaactgggattctcaggctggaaggccaaagcctggcttttgcctcatagtgaattcccacaggagatagcatctctactatctctcggaagacagccattagcatgccaaccacaacactggcctttctttggaaacttccacactcactgaagacatgttttgtaaacacaagattttgcaaacataatttgaaaccacatacaaataatttctaccaagtcaaaaagaagtgctccttctcaagactcaaaaaaagcaaactagatttttaaaacctttctactggaaaatacagcacacaagtgaacatacaatatcaatgctcagaatatggataatcacaaaatgaacactagtgtgacaaccaccaccaccattcagaaatgaccagcacccctaaatacttctccatgtctctttcagacatatctttctcccctccaccctggaggtaatcactgttctaattttttatggtaaccatttccttgcttttctttaaacttttgtcatctatgctggattctttaaaaatatagtttctgggttttttttttttttttttttttttttggagatagcgttgccctctgtcacccaggctggagtgcaatgatgagatcttgacttactgcagtctcaacctcctgggttcaagtgatcctcctgtctcagcctccccagtagctgggactacaggtatgcgctaccatgcctggctaatttttttttcttttgaaacagggtctcactttgtcgcccaggctaaattgcagtggcacaagcttgactcactgcaacctccgcctcccaggttcaagcgattctcccgccttggcctcccgagtagctaggactacaggcacgtaccaccatacctggctaatttttgtattttttggtagtgatggggtttcaccatgttgactaggctggtcttgaactcctgacctcaagtgatccactcgcctaggcctcccaaactgctgggattacaggtgtgagccaccgcgcccagcccagactttccttgtttttgatgacttctgaggagcagcagtcagatattttgtagaatgcccctctattggcatttatctgatgtttttctcatgattacactggggttatgggtatgggggaggaagatcatagaggtgaagtgcctgccattatcattgtatcacatcaagggcacacactgtcaacatgaccgatcactgttggtgttgaccttgatcacatcgcctagatagtatttgttgggtttttgcactgcaaagctgctctcccctcccccacacctttccatagtgtatatagtaccttttgaagaacataaattcttaattttaactgcatggtctgggagaggggcatgatcttcgcctccacagggctcctggatgggatgtctcatttgcagggatcagctcatgttatcgcgctcactccgggatcactcagaactcactgctggacttaattgggggacgagggcgagacttaaggaagcaaatggaattatgtattctttcaaatcttgcatctggacctctagttttgaaactcaagagccaagaatttgacatttgttttcaggttctcctgagagtcctcccctcagggcaacggatggctgcagtcttgcctatttggcctgtggggagggtggagaaaggcttcttttaggctaacaaatggggtcataacttcaaatattgtattaccctgctacacacatatccatctctaaatgcttcagtggaaaagttaaccgcacatcaccagttgtttactgagcgctaaagattgaatcagcagggctgcattcacgaagcagaactgctgacgattcagaatatgaccttgagtacatatgcccttccctaggcttcaatctctcaatctatgaaacaaggagagggcttccgacaatgtttatcttgctaaattccaaggttgtagagaacaacaatgcccctttgcaacctcaggtgaaaagggcccttaggtgtaaagaatacactattcgctgttagctcaaaaggggatgttatttctcaagacataaatggattgtgaaagattgtgaggttttctgggggaatgggggggtggggacttattttatattccagtctatttacaaattttttcatcttcctcaaattcaaagaaataagaatgtactagaagtcttaagaacagaaacattcactcctttccctgtttccttaagctggatgaaatggcaggaggtctgctccacttttagctgattatgtccctaaataaggtttagataagttcttgcagggcctgtgattcaaaacctgttctaagacatgcagggagatggacaaagaattttagttggtgtgaaaagattgtgaatttatcatgcttaaaaatgaatttttaaaaatgattaatttttttccgccgggagcagtggctcacgcctgtaatctcagcactttgggaggctttagtgggtggatcgcctgaggtcaggagttcgagaccagcctggccaacatggtgaaaccccgtctctactaaaaatacaaaaattagccgggcgtggtggttggcgcctgtaatcccaactacttgggaagctgaggcaggagaattgcttgaactcgggagttggaggttgcagtgagctgagatcgcaccactgcactccagcctgggcaacaagagggaaacttcgtctcaacaacaacaaaaaaagtgattaatttttttcgagtcagtcacattagagtggatgttttggaggggtgctttagacattttggttctaataatttcacatgcctgatggaaaaatctctcttctccctttcagagttctctaaagtcccatttgtacaaattctcctctagaggaaaagcaagtttgagagtttcctgtttcttgacgttaggtgaggaaatcgactctgttccctaaatttgagagtggctttggtaagcatagtgtgttctagaaagttcaaactatttagtgagtgtttctctttttttgctttctttattttctaataataaaaagacagggcctcactatgttatccaggctggttttcaactcctggtgtcaaaggatcttcccacctcggcctctcaaagcgctgggattacaggtgtgagccaccacacctggcctcgagagtgtctttctgattcagttttcagttgggcaaggttttcctagggtgggtctgctacctggggaactcctggggtcactgtttttaactcgctctcattttttcatcctcaggaaactccaagaagaaaatgggactggaaactgaagaaacagtaaggcattccccccctcccccccgccaataagtctgtcttacatttgtgcagtaaatcatgctcaaacgccttcaatggcttagtgtaggtctcttatgtacaatttaaaatcctcaataaatgtgcctaactgaaagttttagctctgtgcctcctctctcatataatctcttatttgattactgatgcttaacctgacggggctttctccccaccttaactacagttttcactggaacaatctccccatctcctatccttggatatgaaatcatttccacctttcaaggtcatcagctggggcgtcattttctacctacagacgctatagtgtgtcccttcttgcctcacatcataggcaaaagactatgaactgcgggaggggaggagcctggtctaattactatgtctagccttcatacatcctcatagaacaccttgcccagattggaaactgagtgaatggacaaattaagtaattaattaactttctgtcccatgactccttgtagattggaaagtctttggaggtagagttgccagacttagcgaatcaaaatataggatacccagttatatttgaatttcagataaccagtaatacttcttttaatacaagtatgtcccataaattaattgcgacataataacaaataatcgttgtttacatgaaattcaaatttaactgggcgccctgtattttatctggcaccactatgtggaaggcaggggttccccgttgcgcctggcttcttcccagtaggtgctcggcgtctgtatacttgttagagcgaaaccccaaccagccccgcctttcacagctggcgtccgtagccgggcggaggcacacgaccaggaaagacagacaccctggttggagaccgtcgctcgagactggcagaaagatctgcactcgggaggcaccctcaccccgtgggctccgggacccctcgactagctccatcacccattccgactacccgccctacgctccacctcttgacccgtcatcaccgaccggggggcgggactgcccgacttttcaatcgctgcctaccattggtagaactctccatccgttactttaagtcccgcctatcaggctgtcgcttcccaggttacgtcccttccgtaggccgcggcgtaactggtgattggtggagaaagcggcagctgtcccagcggaagcgacgaagggacgggacccgggagcctggacgagtccgagcgcgtcacctcctcacgctgcggctgtcgcccgtgtcccgccggcccgttccgtgtcgccccgcagtgctgcggccgccgcggcaccatggctgtgtttgtcgtgctcctggcgttggtggcgggtgaggagccgggggccggcaggacgtgcctggggaggtcctgcgccgcggggcttgggggtcgggggcggccgcgggcgagtagctgcgaggcaggtgccgcagtgcggtccgtcagcggcggcctcgcctcagccgcgtccccgtcagcatcttctctggatcggccgtggcggcgcggcctcacgggccgccggggccggggctgggctgcgtagggggcccctgagcctgcctccaccctccactttgagggcggcgcgtccggccggcttcttgcgcctgaaaaggcccttcagagtacggagatgcatttctcagtgaactgggattgagtcgcagcccgctgcgaagaagagaaggcagactttttagctgccactggctgccacgatgtttttgcatttgtatggtgccttcatttctagtggttgtcatcagtaattgctgaaatccctgcccctcccttcccttatgtatatttccggatgcaaaagttgagatggagtcattatttttatatgacttatatttcttaaggcgaatacaaagcacctctcaatagtttgtcagagttccaaattttaaggatttggaaacaggatgtgagtcgcatttttagggtcacatgtcaataaatggtagctttctgagtagaacctagattcctaagcattcagcaagaggtgaagaaatcagctaatacgtggcctcttactgcatatcatgtggtaatgtatttcatttgacagcagtccttagagggcatcatctttgttttgcagggtgatcaacctaaataaattacccaacactaaacaggttgggtgctggatttgatttcagatgaggtggtgccagcgcatcggccttttccattatatatgttgtgttgcacaagtaacgctattactgtgtgagaatgtgggagtgatggggactgagactggaggcacagacagtagtgaacaagaggccaagttgagaacggcttggaggaatgggtgctctgatctcagtgtgtcagtttaaaacctatgggaggccgggcgcggtggttcacgcctgtaatcccggcactttgggaggccgaagcaggcagatcacctgaggtcaggagtttgagaccagcctggccaacaaggcaaaacgccatctctactgcaaatataaaaattagccgggtgtgttggggcacacctgtaatcccagctactcaggaggctgaggtacgagaatcgcttgagcccgggaggcggaggttgcagtgagccgagatcgcgccattgcactccagcctgggcgatagagccagaccttgtctcagaagcaaaaacaaacatacaaacaaaccaaaaacctatgtgaggtgttgggaggtcctgcttgtggaatggcgatttaattctgcaccagtatgctcttgaaatctgcagatctctgtccctagaggtgcgggggttttgtgtgttaatgatagttacgttgtatccatgccccaaacgttttcgagttctttgtttctttcttctgtttctggctctggaaaggtctttctgatctactgagatactttgagggaattaattttaattcagtttttgaaattttaaaaatattccctttgatcctgtggtttaactgaacatctattgagattccatgttttaatattttgactgatattattttgattcagtgaggtataggcttttttgttttgggtctgagataaaataattgcttctgcacatggtttgaacatgttttccttactagcatagccgagttcatacagaacaagaacctgatcctgtcagcttctgaattgctcagtcttgtcagatgaggttcagttattattttccacaatgactaaatgtgatgtagtggaaaacatctttaagagctctgacttctctattccaggcagaaacaaaaatagaaatcctttaaaacagtgttgccaaactagagggagaactagggacctagagagagaggaagggaactaggattttgaataccatatcatgaggcgtatttgataaaattcagatatttagcctggagaagaaaggccaagggtgaacacatggaatttgaagtgatgtcatgtagaagagggagataggatccatttttttattattattgattccatccaccattcgtagacgataatagcacagtatagtggagttcctagagggaaggacacttagcccagactggggaggctgaggaaaatttcccatgggaggtgcctcccagggctaatgtgttgaaaagttggggtgggaagaaaaggtatttgaaacagaacagcatgtgtaaaagcatggcgatgtgagagcaaaggggcaagtagtttggtggggctgaaatgtacaggattaagttggggagataccagaaataaggctgatgaggtttcttgggtgttaatgctttgggttttgcctcagagtctctgggcagtgagagaaggcatttaagcagaagggtgaatgatcagatctgtattttgaagcagttatgggaaaggctggattagagagtggcatgacaagggtcataaggcacccaattctagcaaacctggagagggcctgaagagtgtgccctggacatagaggggaaaggatttgtgagataagaaaaaaagatgaaattcagtggctaattagctgtgttgctgaggaagatttaaagacgactgattccagccactgggtggaaggaaggtggtatcatccttcaagatagaatacaggagaagtgtgtggaaagatggtgaattgggtgtgtttttggtgtttgcagccttaggagtagttgggctcagcctgggagagatgtagaataggaaagcagtaagagtcaagaatggagccctcagatctccaaagtggagtatgctaggtgatccatttggatgccagatgaatgtactagaaattccatttatatcctttttgtttttgtttttgagacagggtctcactccgtcacccaggctggagtgcactggtgtgatcacagctcactgcagcctcgaccacccaggctcaagcgattctcccacctcagcctccctagtagctgggaccacaggcgcatgccaccatacccagctaattttttgtttgtttttgtagagatgaggtctcaaactcttgggctcaagtgatcctcctcctcagcctcccaaagtgctgggattacacgcaggtgtgagccatcgcacccagcctctatctttttttttttttttttccttttttgagacagagtcttgctctgtcacccaggctgaagtgcagtggcacgatctcggctcactacaacctccgcctctggggttcaagtgattcttgtccctcagcctcccaagtagctgggactactcttgttgcccaggctggaatgcaatggcatgatcttggctcactgcaagctccaccttccgggttcaagtgattctcctgcctcagtctcccgagtagctaggattacaggcatgcaccaccatgcctggctaattttgtatttttttagtggagacggggtttctccatgttggtcaggctggtcttgaactcccaacctcaggtgctctgcctcttgagtagctgggactacaggcatgcaccaccacatctgtctaacttgtgtatttttttggtagagacggggtttcactatgttcaccagactggtctcaaactcctgacctcaaatgatctgcctgcctcagcctctgaaagtgctgggattacaggcatgagccaccacacctggcctcatttttgtatttttagtagagatgaggtttcgccattatggccaggctggtcttgaactcttggcctcaagtgatccgcctgtcttggcctcccaaagtgctgggattacaggtgtgagccatcatgcctggcctatttttatcttatctctttttgaataataatggtcaggtattttgtagactgtccctcaatttgggtttatctgatgttttctcattattagattgggaaaaatactacacaggtatctcatccttttaaaaacttttatttttgtatgctttgtaatatagcacaaatcaaatacataatctattactatagtagaagtatatactttacatggagaggatgagagggacagagagaagaaagaagggctactttccaattttgggctgacagggttgaaatctaaaaagtttggctaccactgctttaaaggacaggaagggaaagaaacagaggagaagcagccaaagggattgcaaggaaaaccaggagccgtggctgcatgaagaccaaagcaggggcttttcaaggagggagttgccagtatcaaatgctttgggaagttagataaaattaagggatggaaattgccttttgagtttggggagtcgtttcagtggcatggtgggcttggaaggtgtgggcggccaggtggggtggctcacgcctgtaatcccagcactttgggaggccgaggcaggcggattgtttgaggtcaggagttcgagaccagtctggccaacgtagtgaaaccctgtctctaccaaaaaaatacacaagttagccagacgtggtggtgcgtgcctgtagtcccagccactcaggagtctgaggcaggagaatctcttgaacctgggaggtggaggttgcggtgagctgagatccttaccactgcactccaacctgggtgacagcaagaccctgtctcaaaaaataaaaataaaaaaaatttttaaaattttgtgggttaagtagtaaacttaaaatgaagtatagaagcaaacggtggttgactgctcttcctggattcttcctctgaaggggagcaaggctggtagctggtggagactggtaggaccaaaggaggttttttatggttttagttatagaatgggagtgccttgagcgtatttttatgctgaagtgaaagggccagtggagagggaaaaaactggtggtttgaagtgtgacttcattcattcattaactcaacaagtacttattgagcaccaatgtgtcgggctctgttctcagccctggggatagtgtgtgaacaagacgcactgaaatccccgccttcatggagcttgtattctatagggccatcttttgatggctattaccatatagccacctcactcctgatgtgttgtctgtcctagaagagtggcttccttaacaaacagtgaaggaacaaaggtccctaaaaagactgaacacaggattgtcttagtctggaggagggacatccctgccctcatgtctggagggagaggagttacagataggggcttatgcagataaatttgtggtggggagaggaagcaggtagctcaagaaattcctctgttttctctgtgaagctggagatgaggttatctggtgagactgagttggggagtgatagcataggaagttgaaagttaggaagcccatttcagttcagtacaaggaaaaacttttcaaaggactagaatgttaggaaaatggagccagttgctggcaaatgtagttcgtatattgaggtggtgtccccatcactggtagtattgaaatagaggaggggtgactttctgccaggtatccctgagacatgcttatacttataataagcagaagtttggacaaatgaccttcctctgtataggagtccctgactctaaggttttctaaagctctgggcttctgaaggactgttgtacaggcatggaagttgaaactacgaagctggggcaaagttatttggtataggtttgccagaattgaatgagtagggccgtgtctcaaaacaagggtatctccaaatcaaaatatggttttttaaatgtgtatggtacctggggctgggcgcggtggctcacgcctgtaatcccagcacatagggaggctgaggcgggccgatcacttgaggtcaggagtttgagaccagcttggctaacatggtgtcaccctgtctctactgaaaatacaaaatttagccaggcatggtggcacacacctgtaatcccagctacttgggaggctgaggcaggagaattgcttgaacctggcaggcagaggttgcagtgagccaatattgtgccactgcactccagcctaggcgacagtgtgagactctgtctcaaaacaaacaaacaaaatatgtgtatggttcttgggaagcataggtctcttggttccccatttttcttagtgtttgcagtactactactttagtgaaccaagatatctatcagttacaaaagaccattccattctgctaatttttttggtctgtcttcagctagagcagtttggacattcctgttctgacagctgtgccggattgaaatttgtaactcccgtgtatcagcaccaacctgaagccttttatttactgtcaatactgcaacaccaaaacatttactgttgcttccaactttatttccatcccctgttagtggtactttccttaggtcaagagaataacactgattctttactaaagtctaattttcccatactaggtgtggctaacatttgttctagacttggagcccatttttttaataggaaccccaaattaaaaaatcagccaggcatgatggcatgcatctgtagtcctagctactcagaaggctgaggcaggaggctgaggcaggaagatcacttgggccctggagtttgaggctgcagtgagtcatgcagactcaaactcagcttgggtgacatagccagaccctgtctctaaaaaaataactaggtacaaatttcatccttaaatgtaaacaaccaatcgtgttcactttggttgcccaaagactacaaaaagctcaggggctctgcccttaggcctggcagtgaagcagttcccaggcagagtttctgttttcaagggtgctcaggatttggagaaaagttcctttcagtaactgaaattagctacttgtccctgtgtaagctagacatcacgaggttaatagataatggatgaagaggccaaatacctcatccttagctgtggagagcttataaaatagtccctttattctcatctttatcttttaatcctgaatccttagactagttgactttatcattacagaataccttttcttaccctcttgacatgtcaactacaaatactgtttcctggactttgtttctaaagtctgaagtgtttttatgtttctacttgtgacatgtatgcccccccccccccccaacatttgacagtccttatttcactagggttgcctatgggacataaggaaagatgttacctatcctaagacatagtaacctggtaaaatcttatagtgaaataataggaactttatgaatttgcattgtgtagaaaggattgatggtagaaataatttagagatttcaagcttcttcctttttagtctgtgcctgggctttgttttttgttttttaaattttggagatatgccactgatttctaattcctgccaaattgccacatgcctctttaagagccatcagtaggaaggtgtctatatcattaggaaaccctgttttgtagttgtacctttgttgatctctttttgagacttttgtttgtttcttgttcttatcaggcagaccctgaaccagaataggttcagagaggctctgatagttgtacttttgttccagcagaatgtgtggacttaaattcttagagtgatactttgaaaaagaatttgttattgtttaggactcagcattttgaccagtcataatttaatacgctaagtcagtggtgaatggggaaacatgtattatatttaataattgtcaaggtaaatgatttatgatgttgataattcatttactgatctgttttcttttcaggtgttttggggaacgagtttagtatattaaaatcaccagggtctgttgttttccgaaatggaaattggcctataccaggagagcggatcccagacgtggctgcattgtccatgggcttctctgtgaaagaagtatgtatatattttttaaatgtttggagctgcttttaagaacatttttactgatttctgctaatagcccaaaaaagcatcaaacgaacgtaggtacgtttggtacagattacaaaagttaaaaagctcatctggaccaggcacagtggctcacgcctgtaatcccggcactctgggaggccgaggtgggaggctcagttgaacccaggaatttgagaccaacctgggcaacatagtgagactcccatctcaaaaataaatgaattaattttttaaaaacccatttgtagttgggaagattttggatgagtgcttcaagcttggcttctgaaacaaatcattagaaatcattaactatataattatttattcatagtagtgaaattctttgtatattagagaatgcatctgtcctactcttaataggatatctactttctggttttttttttttagtataggcgatagattcactatgaatgataaaatatatatgcattatgcctgaggttaggaaaataatgtggtcagtagccatggggcagccaaggaccttggtttcctagaatggagctatgacctgttgtagtaattggctgcttatgtgattgtagggggcgggagggtctagatccagtcaatgtgagagatcgaaaggtaagggctcagaagaaaggaaatacagcttgctcggtgctatcatctccttctctttgtaagtctggtgcttttgatgtggtctctagatatatatcatcagtcactgaaaggaacttttctccaaatcctgagcacccttgaaaacagaaactctacctgggaactgcttcactgccaggcctaagggcagagcccctgagctttttgtagtctttgggcaaccaaagtgaacaggattggttgtttacatttaaggatgaaatttgtacctagttatttttttagagacagggtctggctgtgtcacccaagctgagtttgagtctgcatgactcactgcagcctcaaactccagggcccaagtgatcttcctgcctcagcctcctgcctcagccttctgagtagctaggactacagatgcatgccatcacgcctagctgattttttaattttttgtagagacagggtctcgctatgttgtccaggctggtaggtctttaactcctggcctcaagcaatcctttctgcgtcagcctcccaaagtgctgggattacaggcacgagccaccacacccagcctgtacctaattctttttttgttttgttttgttttgttttttgctacagggtcccgctctatcacccaagctagagtgcagtggcctgatctcggcttactgcaacctccacctcccaggttcaagagattctcccacctcagcctccccggtagctgggaccacaggcgtacaacaccatgcccagatcatttttatattttttgtagagacaggattttgccatgttgctcaggctggtcttgaactcctggacacaaggaatctacctgcttcagcctcccaaagtgctgagatgacaggcgtgaacaccacacctgaccatctagttctttacaaccttaaacttgactactgatggctattaaaataactgagaaataattattagtaaactaatgatagttacttttagtaggaattgttttatttataaagatcttagtctaaagaggatgttttaatgaccatcttgctatgtctctgtgaaagataaaagtgatgctgtatatgagggcaaaaaatgatgtgggggaagaaaatttccatggctacatgaagaaaatattttgtgatctgaaatttgaaaggtacctatgttttgtttacttgcttgcttttttccacaaaaggtgtcagatgacttactattggactttatttcaaatctgtaaaattttaagaaaatgaagagggtagaaatcagcattcttgattaggggattgcaacgactgccacaaataaaatgtttactttccctgtgaattttccttgtcagtgtcatctcagaaccccttaactctgcttattagatgttattggggaggtgggttcctgagttgataattaagcaccgctttgtgcttttcaatgtttaggacctttcttggccaggactcgcagtgggtaacctgtttcatcgtcctcgggctaccgtcatggtgatggtgaagggagtgaacaaactggctctacccccaggcagtgtcatttcgtaccctttggagaatgtgagtatttattataaaaaattaaagggatgcattttacattttcccttgtcagctgtcattatgaattgcattctaaacatacttctcttatctgtttttgatgcacagtttcttttgaaattctttgacaaacacaatttctttttaagaaaattacatgatgattgtaattaactgaggcttggctgttctctgtggatgagagtactgtttaagataagagatagagaaattgccccactcagaatagccagaggcttgaaaaagagagccactaaaggagaaaccagttggggttgtatcctgctactgtttttttggccattgtcttgtcatcttccctgcaggattttacctcttttcgtgtgtaaggacactggaggctgcttgctggctcacttactccttcactggctattcaggcaatgtgggtgactgtgctgatctaagaggccctccttccattataagcatatagaagtgcttgaaagaatgtcacaaaaaacatttttactagcataactaaatttgaatgcaagagggggtgatatacacaggtgttacatatggatggaaaactcagaagccatagtggtgagcagaagctgacgctgaaactgtgtttcctgcagaaagccagggactagaaatgctgtcaacttgttcttgaaaagcagactagtaaaactagtaaagctggcttgctgcccttggctgttggacccaaagagtcccctgagataaattagaattagaattataggcttatgctgtgcagagtggttctttgcaaattcacatgacctgccccatagggacatctccatagccaagggctcctttggtcaaatacggaagatgagtggaatttacaaagcacctgaaggaaaaaaaatgccatgagaaacaggtgcaacaaacagaattcatctccttagaactacggagaataggccaatttccaagagatctaaaaatacatacattaaaattgtgaaaaaaagggccaggcatggtggctcacgcctgtaatcccagctttgggaggccaagatgggaggattgcttgaggccaggagtttgagaccagcttggtcaacatagcaagaccctatctctagggggaaaaaaaaagaaagaaagagaaaaaatttgtgaaaaaaaggaaggaacagaaactatgagggagttataagacatttttgatacatggtgctttagctgatacttcaaaatatttcataatttatattgtgattctttaacccatgagttatgtagaagtattttttccaaatgcatgggttttaaaaaagtaatttctaatttttaaatttctaagttcactgcattgtaatactgtggtctatgtgatgctgaagttttgggatttttttttttttcagactttcctgtggtcgagtatagattatttccaagtacacatggcatacttagaaaaaattactgtgcagtagtccacaaggcaaatctcaacaaacaataaagaatcagtgtcatataaactaacttctctgaccacaatgcagttaaatctgaaaataataataaaatgatatcttaaaagggtatttggagcccggcaccatggctcacgcctgtaatcccaacactttgagaggccaaggcgggtgaatcacttgaggcgaggagtccgagaccagcctggccaacatggctaaaccctgtctctactgaaaatacaaaaattagccaggcgtggtggcacgcatctgtagtcccagctactcagtggctgaggcacgagaattacttgaaactgggaggtggaggttgcagtgagctgggattgcgccactgcactccagcctgggtgacagagcgagactccatctgggaaaaaaaaaaaggtatttggatcaacatttctcctttccccatccacccgtctcccccagcgtcttctaaccatcattctactctacttctatgagttcaacttacaagtgaggtcatgtagtatttgtccttctatgcctggcttacttcacttaacataatgtcctccaggtttatccatgttgcaaatgacagtttcccgcgctttaaaggctgtatagtattccattatgtttatataccacattttctttctgcttttttcttttttttttgagacagaatcttgctctgtcgcccaggttggagtgcagtggcgcaatgtcatctcactgcaacttctgcctcctgggttcaagggattctggtgtctcagcctcctgagtagctgggattacaggtgcatgccaccacgcccagctaattttttgtatttttagtagagatgaggtttcatcatgttggccaggctggtctcgaactcctgagctcaggtgatccacccacctcagcctcccagtggatctcagtgctgggattacaggtgtgagccactgcacccagctgcacattatctttatccattcgtttgattatggacaccgaggttgcttccatccatatcttagaaattgtaaatagtgctgcagtgaacatgggagtgcagatatctcttcagcatactgacttcaattgctttggatatatatacccagaagtgggcttgctggatcatgctttagtgatctattgcacaaaatggtgactatattaaataataatgcattgtgtatttcaaaattgctaaaggagtagattttagatacttttaccacaaaaaaaatataagtatgtgaggtgatggatttgttcattagcctgatttaatcagtctactttgtaaacttataacaaaacataacattgtaccccataaatatatacagttactatttgtcagttaaaaataaaataaaaagtatttggaaatagtaacaaacagaagataacaactcctcagatttaaagcatatggaacacccagtaggcaaaagccagatccacacctacatacggtgaaattgaagagtcatcaaggaaatggaaaatcttaaaagctgtgagggagaaaagacactgtcattacaaaggaatgagagtagaaggaaagcaaggaaaatgtagtgattgtgtagtatgagctaggctgagtattatttgcattgtcataataatgaaatgatgctgatcaagtgaaaattttgatataactattgggtaagagtggggagatagaaacagaagcagagcgcatggatggctcagcgcatggatggggcagtggttggtgatgtgagagagctaaagcctcattttctataatggatagtaaatagacaagacctaaaattgaaaaatcaggagatgtaatttaagtgtcttatttagagatgttaaaagcaaaaaaagtcaacaagaaaagatagttggaatagatgcactcctaaataattcatgggttgaggaggaaatcactgtggaactttttaaattatttggaactgagtaacaatgaatgtagcatttatttacaaaattgggaggtgcagctaacgtggtaagaaaagggaaatttatagccttaaatgcatgttttagacaatttaggttgtctaagaatggaaattaatgagctaaagaaagcggaagaacttcagagtaaatacacataaagtagaaggaagggaacaatacagatcaaaaggcagattatttcacagggagcatttaagtcattttttatgtgatttctgtgaaaatcattgcagaagattttctttaaaattataaaaatccaaaatgccattttgagatttttattagcatgtaatccaaaaataaagatttaaaaacagactagcctcattttacatgagaagaagctgtgctgtgtgaggagctcattttattgcttggccctggttggctgctcaatgcttttcctagcagaagatggtaaatgagataaaagattcaggggcaaaccccacaaaacataaaaatcagagtatcttagaattccatttaacgaagcttccatttgattagctagctgttttagttagaatttcaagtcatacaggtacagaaatttgaggacagatatgcatctcccttacaatacagtgagagaaaaaccatcattcgatattaagcagccaagctttttactttttgagcttagctgcctatataattatttcttttccttcattggtgttcatttgattcatgagctgcttcaatttgatcgctatggacatggttcctaatcttcaactttcctgaaccgagcgccatttcactaagtgaagtgaggctggaaagtttgcatcatttgctcatgtattcccctcacagcctgaggaggtaaactctatgatcgctaaaggaaagcacctatagatgattcagggcggctgctagcagtatgcttttgcaactttgaactctcttccccctcttcacttactcattaactcattttgagagaatttggggaagagttaataagcatcttgagtaagagaaaaaaattatttcatttcacagaatcataaaattgatcacttaatattgatgctgggcctgggcatggtggctcacgcctgtaatcccagcactttgagaggccaaggcaggcagatcacatcaggccaggagtttgagactagcatggccaacttgatgaaaccccgtctctactaaaaatacaaaaattagccaggcgtggtggtgcgtgcctgtaatcccagctattcaggaggctgaggcaggagaatcacttgtacctgggaggtggaggctgcactgagccgagatcgcgccactgtactccagcctgggcaacagagtgaggctctgtctcaaaaaaaaaaaaatgtgatgctgggattttatcagtaagacataatcacattgatttctgcctgtatcatattagcgttactttgctacttgtaaacatgaatctttaagtagtaagggaactactgaatgaaagatcaatgtaagaaatctccattaaaacaaaaacatgactgtactgcttgttttaatacagtaatactgggaatgaaataatttttttaggggaaaaataactgtaatttatttttttaaatcatgtactgcaaaacaaatctatggggatagaagtcagaatttttgttacccttgagggtggaggtagtacttcgagggcgctgatagtgttctgtgtcgatctggctgggctacctgagtgcatgcatgtgtaaacatttgttgagctgttaccccaagatttgtatactatattatatgtattttgcactttaataaaaaaattgaaggaaaaaagtaggtcttatcaccattggttatttcaatctaataatatcaacatgtcctaagataaaggcttcaaaaaccttgtgacatacttaacaccttatctaagagtctttaggctatctgaagacaaatgttaaatctcattaaacatttttaaaattttgaaatgaaagatgaattccatttttatttcaattaaattcaatactcagattcctctaacctcttaaatgcaaattaaatactttattgtggaatatgcattcatcgtggcacatttagtcaatattgaaaccaaatgtattgctgcttcaaatacatgaatgaccaccagaaaatggtttgtgctagatatagtgttgtgtccatcaggtttaagttattttccactgaggcatgatgggagatacagacttggcttaccagggggctgtttaatcttctgtgccctcaaaagggcttgtttggaaatgatttcgggcttctaaatttccatagaaagtgctggaaaaaagtttaaggcttctttttaaataccatctgaatgatttttcttcccactttggttcacataataattgcgttcttactcttaaatttcaggcagttccttttagtcttgacagtgttgcaaattccattcactccttattttctgaggaaactcctgttgttttgcagttggctcccagtgaggaagtaagtgataagggttttattcaagacattttaaaaaataagcttttattatttgaaaattatgaaatgtaattttattatgaaaatataaaactaatttatgaacaatgttgtcatacctctgggtattggaactaatctgtagaatttgagcaacttaaaattttctattcttcttacagagagtgtatatggtagggaaggcaaactcagtgtttgaagacctttcagtcaccttgcgccagctccgtaatcgcctgtttcaagaaaactctgttctcagttcactccccctcaattctctgagtaggaacaatgaagtaagtgcagttattcaatgaatacatgaatatcattaatttccgtctttttaaaaaatagagacagggtctcactctgttgtccaggctggtcttgaactcctggcctcaagcaatcctgtcttggcctcccaaagtgctgggatcacaggcttgagccactgcatctggcctcccattccttatactacttgaaattttggaaattttgctattttagaaaatgaaagattgtgcacatttactgctggggtagattcttctttagtgtaattttcttatgactctcatgaataaactgatcctttttgtgagttgagctgtggtaaataacatcacattttagcacgagggttgccacctattaattcaaacaagccagaggtcatagatctacttggtgactggtggagctgtgtggatctggtaacttggaagccattgttcactgcctctgctgatttgttgccacatttttctcattcattctggacattgcagtggagggagccacctctacttttgactcctgtccttcagtttctccatctgctcatgcgccctcttaaccatgtggcatgccactttcgtggtggcctcccctttttatttgctgtggatgaccagggccatcatcctttattctctgatgtggaaactattcaagggaagtgagcaaactgggccaatggtaggatgtcattgcagagtgccaggatatcctgatgctttgaaggaaaaccactggagaacttggatgctttatcatggttttgccaaaaatatagctattgagtggcagtcactgtgctagggaatggccatcacctttttgttaggaaataatgttttatatgcattttcaattgaagcaaacataccaaatggaagataattatataaattcacttatatgatcaacatttgtaatatcctgtgccttgcttggtaaatggcaaataaagatctctggtgcacatttaaaagaatgctctttttttttgggctctctgaaggttgacctgctctttctttctgaactgcaagtgctacatgatatttcaagcttggtaagtaggctgctctaattttttaattccatttattttggtttctagagaatccttgaataatagtaaaggcagttgaaaagtttgattaagtatgccctagatttatgatcccatgaaaattgaaaaattagtggcaatattgggaattttgaacacatccatgttatagtcaaattattttgcatttctgctttttagggagagacaacatatcttccaagaacacaagcctgggcgtaagaacaccctggccatagtcctaacttggctgttgatttcttgtgagacttaattcctatctatatctttgggcctaaaatagaaataatagtttggactaataatgctgtcagtcaagtcaagaagggacgaaatccgtctgaagggtatttttttggtgaatgattttttaaaaatcatccttgttactgaaatagaaattcttatctgtttgctaccttctgaagttgttttccaaactttttcaacaggtgttggttcggggagtctggaagtgtagtgcattcctgggatcaaactggtccagccatctgttctttcatacgttggcccatacctgagtttttaaaactgaggaattttgttgaaagcttttattaaatatccaaggagtcttgtactgctcctaaacatgagattcgtgttggatttatcagaaacgcttattcaaaccagtttcttttgccaccattttagactatttgcatgttgtggtacactggtatggtttagtttagcctagtttagttaggcataaaactttaactggctgtgtttgacgtctttcatcttactttatccgctacctttttttgtttgtttgttctcctaagctgtctcgtcataagcatctagccaaggatcattctcctgatttatattcactggagctggcaggtttggatgaaattgggaagcgttatggggaagactctgaacaattcagagatgcttctaagatccttgttgacgctctgcaaaaggtaaatatcaatgcgacatgagaggttggagtatgaccatttcacttttagcctcttaatagaaaaatctgctgtttcaaacactgttgattgaactcttatttgccttctttggggctcctctaattatactggccaaggatggagtagggtcaaaaatgtatattgatatatttcttcctaatgctagaaagaacagcattaggaaaagttatctcacacaaagctttacaaaattattgtggtaaaatatatataacataaaattaccactttaaccatttttaattgtacagttcagtggtattaagtgcaagtacgttcacatgttgtacaaccatcaccatcttctatttctagaactttttcttcttccccaactgaaactctgtactccttaaacactatgagataactgaagtagaacacccagcacagtaccagacagtagatgcataataaatgctagttcccctctgcccttgaagttcttcacctgcatcctttcagtgaggcttcatattttaatctttatagatgtttgtgattaaccagagaccacttaggaagatttcatttctctttccaacttcccttcctccaatttatatgctgacaaattcagtctcttcttaaagtaattttagtctaaacatttgaatatatgttaaagcttaacacttttctgtatagttgagcaaaatcaaaacctttaagacttgcttattgtaagatgtagtatatttcatgagccaggaggtaagtgtacattgttcttgtagctgcacaaaagctttaaaaataattttaataagtatgtatttgactcactgcataaaatgataagtaggaggtaatgcatatgttaattagccaatgtggacttaagccattccacaatgtgtacatatttcaaaacaatatgttgatgtgataaatatatatgattttaatttgttaattaaaaatgaaaaaagtacatagttgagattcccaataatgttaataactaactttcagtttgcagatgacatgtacagtctttatggtgggaatgcagtggtagagttagtcactgtcaagtcatttgacacctccctcattaggaagacaaggactatccttgaggcaaaacaagcggtgagtatattttgagatcctgctttaaaactgtaaaattaacttcttataaaaaaaaaaaaaccaagtcctatatcacctaagggtgacatgaatgagcagtcagtaaatctgaaaaacaatttcagttaaaacgtaagcttcttgttcacatacatatgtgtgctttgccagtgatgatcagttctttagggttataatcagataatgcaagaatttgaattagggataaaagtaaatctgtccaagattataattcaaatatcagtacacacaaggagatatcagaagttaatgtggcgccaggtgcagtggcgtgcatctgtaattgcagcttctcaggaggccaaggcaggaggattgctttagctcaggaggagtttgaggccagtctgaggaaacatagcaagaccctgttttgaaaacaaaaagaagtgaatgtgtgcgggagtggtgtggtgcccacatcctatgggctctgcttttctagcaggcacattgtctttgtggcgtagtccctcacttactgagatcctctgtgtgcacctctttatgattttgatttacttaacagtttttttgggtatggatcttgctttgattttaagcatttagagggtcagggttaagcattaccatggttgctggccatggtaaaatacatatctgtttatgtgtatgtacgtgcacatttacatacatacatatatacttacagctgcagcagaacctagggagggtgatgggaaagagtagtgtagatgctccctaacatcctacgtctgagaacattgcttagggctggctgtatcacttgcagcagatagatatccactcaattacatacacctccgcttcagacccatttgcagccctcaccctgctcagttttactgaagtcagtgtgggacttggagtcggaaggtcgaagccagtgcctgtttgagatagtctagcgattactggtttgagattgtttctttctaaattaaattggggatggaaggacctttgtttcagacagcatgtcagtctagacaaccacccaagatttcccaccataaaacgtctagaaatgctagataaaaataaagatcttttaaaaagtacatagtttgggctgggtgtggtggctcacgcctgtaatcccagcactttgggaggttgaggcgggcggaacacctgaggccaggagttctagaccagcctgggcaacatggtgaaaccccgtctctactaaaaatacaaaaattagcctggtgtggtagcgggcacctgtaatcccagctacttggaaggctgaggcaggagaattgcttgtacccgggaggcagaggttgcagtgagccaagattgcaccactgcactctagcctgggagacacagcaagactccgtctcaaataaaaaaaaaattacaaaaataaaaatacatagttcagctcgcaagaaagggaaattctcttacagagtaaataaagaagaggaggccgggtgcggtggctcacacctgtaatcccagcactttgggaggccgaggtgggtggatcacaaggttaggagttcgagaccagcctggccaacatggtgaaactccgtctctactaaaaacacaaaaaatcagccgggcgtggtggcgcacgcctgtagtcccagctacttaggagtctgaggcagacaaatcgcttgaacccgggaggcggaggttgcagtgagctgagattgtgccactgtactccagcctgggtgacacagtgagactccatctcaaaaaaaaaaaaaaaaaccgaatgtggtaagcaggccgccctaaggatatttgccagctgggtcaccaagagtcctttggtgccttgtgtgtgggggatgggaatggacaactccagataaagctggggaccccgagagagctgtgccctcagtgagagggtagactggaaatttttgcccaccagcacagggaaacagaaaggcacctgggctctgggtggtcagcacatgtgttgagagtggggatgcctcccagagaattcttttttttttttttttttttttttttttggattttttggagataggatcttactctgtcacccagactggagtgcagtggcacaatctcaactcactgcagcctccacctcccagattcaagtgattctcctgcctcagcctcctgagtagctggaatcacaggcatgcaccaccacacccggctaatttttgtacttttagtagagatggggttttaccatgttggccaggctggtcttgaactcctggcctcaagtgatttgctcacctcagcctcccaaagtgctgggattacaggtgtaagctaccatgcccggcctatgagatttctttttagggtgatagaaatgttctagaattagattgtggtgataactatgaaaccactaaaattccttgacttgtacacttaaaatgggtaggaaaaagaacatgtttatcaaaaaaaaaaaaaggaaagaaacaaagaggtcttcatgggcgtgaaatcctttaacgtttgcctcagctctgagctccccgcaggtaaatatgcatgcctgtgtacccattctctcctacatttgaaatcactctcttccattagtttaaggagacaggagtttaaggaacatttactgagtactcacaacattccaggtgctggggctgtagggacaaatagatctcggttacattttcgttctcatcctcactgccaggcaccctgcccccatttctcccacctcatttgactgccgcctcctaacttgtctgaactcatctgtctctctgcttcccagctggctcctcccaaatccatcctacacattgtcatcaaagttatcttttttcttttctttttttgagacagggtctcgccctgtcccaggccggagtgcagtggcgcaatcatagctcactgtagcctcaaactcctgggctcaggtgatccacctgtctgagcctcctgagtagccagttctataggcttgagccaccacactcagctaatttttaattttaatgttatctttttaagacaaacctgatcatgtcactcactttctgcctaaagcttgtcaatggctccttattgcccagaggctcatgtcagattttctgtagcttccctgcttctagcttcatctcctgctgtgttcctacttttaaaattctctagccagaatgaatgatatttcccaaacagtgcctttgtcagaatgaattcagtttcccaaacaatgtttttacacagctctgtattttaaaaaaaagtgttaagtggatcatacatacataagtatataacatatttaatactagttatttaaataataaaaataataacactgtatagctccgttttcatatggctataaagagctacctgacactgggtaatttataaaggaaacaggtttgattgattcacagttccacatggctggggaggccttaggaaacttacaatcatggaggaaggggaaggggaggcaggcaccttcttcacaaggtggcaaaagagagagaaagtggcacacttttaaaccatcagagctcatgagaactcagtatcatgagaacagtatgggggaaactgcccccatgatccaatcacctcccaccaggtccctctctcgacacgtggggattacaaatcgagatgagatttgggtggggacacagagccaaaccatatcaatagcttaagagaatgcttgcttctttgaagctccctattttctccctctaccctccctcatccagaggtaactgctgtcctggatatcatgttaatcccttgcttttctttacagattgactgcatatgtatttgttcttaaacagtgttgtttggttttgcctgtatttgaattttatataaattgaatcatactacatgtatttttctgtgttctttgttcagtattctttttaagattcactcaggctgacaaatgtagctgtagtttagtcattttactgttacatattctgcttgtagggatataccacaattccattctgttgatgatttttttttttttttttttgagacggagttttgctcttgttgctcaggctggagtgcaatggcacagtcttggctcactgcaacctccacctgctgggttcaagcagttctcctgcctcagcctcccgagtagctgggattacaggcacctgccacgcctggctaatttcgtatttttagtagagacggggtttcaccatgttggccaggctgctctggaactcctgacctcaggtgatctgcccgccttggcctcccgaagtgctgagattacaggcatgagccactgtgcccagccttgctgctgatattcttatacatgtctcttggtacacatatagaaattttccctagcgtatggacttactggatcacaggatatgcacaccttcaactttattaggtattgtccagttttcccaagcatttggactggtttatacttccaccatcagtgcaagtgtcgtctccacaaaggcgctccttcttgcttcctcctagtataagtagctgttatgccacttatgaagaaatgtttgttagacaaatgaatcacagtcactagactgggataatttcctattttaaaattcttccctcttgatttttctttcttttctatattgtagaagaacccagcaagtccctataaccttgcatataagtataattttgaatattccgtggttttcaacatggtactttggataatgatcgccttggccttggctgtgattatcacctcttacaatatttggaacatggatcctggatatgatagcatcatttataggatgacaaaccagaagattcgaatggattgaatgttacctgtgccagaattagaaaagggggttggaaattggctgttttgttaaaatatatcttttagtgtgctttaaagtagatagtatactttacatttataaaaaaaaatcaaattttgttctttattttgtgtgtgcctgtgatgtttttctagagtgaattatagtattgacgtgaatcccactgtggtatagattccataatatgcttgaatattatgatatagccatttaataacattgatttcattctgtttaatgaatttggaaatatgcactgaaagaaatgtaaaacatttagaatagctcgtgttatggaaaaaagtgcactgaatttattagacaaacttacgaatgcttaacttctttacacagcataggtgaaaatcatatttgggctattgtatactatgaacaatttgtaaatgtcttaatttgatgtaaataactctgaaacaagagaaaaggtttttaacttagagtagccctaaaatatggatgtgcttatataatcgcttagttttggaactgtatctgagtaacagaggacagctgttttttaaccctcttctgcaagtttgttgacctacatgggctaatatggatactaaaaatactacattgatctaagaagaaactagccttgtggagtatatagatgcttttcattatacacacaaaaatccctgagggacattttgaggcatgaatataaaacatttttatttcagtaacttttccccctgtgtaagttactatggtttgtggtacaacttcattctatagaatattaagtggaagtgggtgaattctactttttatgttggagtggaccaatgtctatcaagagtgacaaataaagttaatgatgattccaaatttgtgtcattgcagtactaaatctattttatattgtaaaaacctaacaaaacaggcttttctttcatcaggattggctgttttgttgtacagataatttcatggtgtttcttttacacttgtttattctcgctgcctcctgagatttagtactaatgtaaggaaggcattttaattaccattcttgttactgaatttatataggatatatgagaaatgcatactttatgtaggaaagggttacatttttctatagcttttttttttttaaattaaaaacattttagagaccagtcttgctaggttgccaggctgaactcctggcctccagtgatcctcctacctcagcctccccagtagctgggattacaggtgtgcaccactgcacccggccctgtagcatttttaaagatgaataagcaactaattggttagaatatgaaggactgtctcaggtaaaggtttaaggtaacaatttgttttctttttcaaaaaacaggatctttaacttcattattatatagcaagattattttagtatgagcattgtagccctgaccctgggatccttccttgtatttagtattagctgtttctgcatcttctttgcaaagatcatcaaattatttatacatagcattgagtttggcaggtttgagaaggtagggtttatttagttgtcaattactgcaagatgcccttgacaattacagtttcaaacccccatagagtgaaggaaatgttggttttctttttgcctctcattgaagtataaataatagggaaactgatactcagcttcacagggaagaaaaactacattgttctaaaatcactcttccatccctacttcctgccagagtgatgggggtgagggttttcagctgtttatcaccaaaacagttcccactctgaccccatggaacgcaacactgcctaagtgtagggagcaggaacctatcatgcgtcagggtggttagaatccatttgtctttcacaactttcttatataaacattgccggagaagttagattgttatgattaaatatgaaataaaccaatgcctttttaatttaaaactgatgagactttaagttctaggggaagaaaaaaaaattaattacatgacagcactaatccatatagggtaaatggcatcagcatccttctatctatgttaggcagagagcaattcattaaaataaatgttctgccaagattattatacctgttgctgatgatttgctcttaaattaagtctaatttgctcaggaacataaatcacagtgtcgatttgtgtgagaggcagaaaaggcagactcatggcagacgattccactgacaaagagaaaacccaatcactttacatctcattggtggactattctaggtttataaaatatctgagattctgcatatgtagatattgcttatggcctaattctattaggaataatatagaattgatttttattttctttggttatgtgtttttttgaaggaataatctgaatccattttcattgataccaagtaatatggaaactgtaaacttactttttttttttttttgagactgtatctcactctgtttccccggctggagtgcagtagtgcaatcacagctctacagcatcaacctcctgggctcaaactatccacccacctcagcctcccaagtagatgggaccacaggcatgtaccaccacgcctggcttatttcttgtagagatggggtctctctatgttgcccaggctagtcttgaactcctgggctcaagcaatcctccagcgtcagcctcccaaagtgttgggattacaggcacgagccactgcgcgcccagcctaaacttaactttgttagggggacggagtcttgctctgtcagccaggctggagtgcagtggcacaatctcggctcactgcaacctctgcctcccaggttcaagtgattctcctgcctcagcctcccaagtagctgggattacaggaacctgcc

SEQ ID NO: 744 - DNA, 100204 bp, Homo sapiens
atacttgggaacaacttatgtatctaatttttagagtacttgcaatgtttaagagaatctaacatcctggagacttgatacattagctgttaaattattgttaaattaaataatttaaaataaattaaataatttaaaaatatataaaaatatacaataatatgcataataaacaatattaaattatgcatctgattttttagagtaactgcaacctttaagagaatctgacatcctggagactttgatatattagctgcataactataattttaaaatatacaataatacgtataataaacatattaaacataataaacatattaaactactgactatgtagtttctggattcacaactatagttgaaaagtataataattagctaaatacacaaatagtattggaatttttataagaacttgggatttgctatagtttcaagttttatttcctaaatttaatcagttatttaagtactgagaaagttttctttgttaagttaggcatctgaagtacttaaaaatgaatacattcaaaataattcaattcttcaatatatctttattttacatatatatacatatatatgtatatatatatatacacacacacacacacacacaaatatataggtatgtatatggttcttctgttagttgtgcctggggtcactcatgtgcttatagttatccagtggcttgattagggctggatggcttttaaagggtagatttctcagctttgaaaactagtctctgctacttattaacacatcctctaataggttatcttaggcttcttaaatgatgatctcaggacaacaggagggcaaggttcaatgcacaagctctttataaggctctatttagtgcgtattttaaaaattattattcaagcaaggtacatcctgaatcaatggggaagaagttataaaagggccaagataacagaatttttaagattccccaagggagcatagtatgagagaaagggagagagagcatgttacgagctcagttgtggagtcatcttaggttacttccaagagccacctgcaaagtagaggttgcagggaagggacagatttacacaaaggcataggcagacggggacctgactcactgggggccattattgcaaacatgtaacacactattcttgttagttgtgagaacttctaatttttcctaggcacagaagcagacttacagatgcagtttaagtggatgggatgactgatttctgtttgcttacaaaaatggggtgttactatatatgtgcacaaaatccaagtgcaattggaaatgtgaaaggaaaataaaacttgggatctcaattcattatgtctataagaaaaaattagggtgaaagctgagtcatgcaagaaactgctctccttttgttcttagcagacagctacacatcaaatgttaaatatctccacaggtagctactttaggacattcatcttatctcacgtaaagtgctgatttaccaccccacgtgaatacataatatctatttccctctctgctctttttctcttgcaacacatagattaccatatctaccctttttctcttccaatggatttttcccctttaaatactgaagccctcaaaatcatcttagagaaaggaagagactacagactgtttctgtgattcagtgtttatttcttttcggcatgtccctaaccttggcaaaataaacttctaaattgattgagacccgtcttagacactttttggttcacaaagacttctcatgagctacattatagatatacaaaactaaatacaatcccttcaataaaactgtaaattgtattaaggcaaattgttttgccttaatttcatggacaagaatgagtgtgcagcaagcagatacttgtcttccttcaacatgaggaaactggaaagatcagtagggagtcagtgtgaattaagccattaaccatggcttaatttgccatgaagataaggcaaaacaaaatgtttaggacacacaatggatacaaaatggccatgctttgttttagagatcggagaagtaagctactatgacttttcttggtaagtcagcaaaaaggaactagaagtaacatccaaggaatataaattcattgctacagagaacaaaggtaagcaataataaaaggtgaggccttcttgtgaagtgattttggtcagataaaactgttcacaaaagcctagggcagaaagaaggcaggtccagacaagtgttcttataacaaggccacttacaacattgtcacataagtcccatttcttgatgaaaactgacaggtgcagaaaatctgacgaaaaataatagttttgccaattttcctcaaaaatatacagtgagttattgaactagaacctgagttaaatttcctgactcacacttaggtacagacgacaatgcataaaaacttagttgacttgttcaagccagagctgacttgttcactgctgtatccccagtgcctagcacaggaaacaggataaaaaatactgttagaatgagttaaagaataaaatttaggtaagattttgcttttagttacaattgtcactgagatctaggttacaatcttagcttcatcaattattacttaacttctatgaacttgttctcacttctgaaaaattagaataaaatttaccattagagaccaggcaccttgagtttatgaatgtgagcaagagggtggtggcagaagggtagaaaagagtaatacagacaaacgaaacttgtaagtgaatacataaaaataagttataacgaatgaaaaaaaaaacagaagaaaaggtgttagagaaaacagacttctattatgaaaacaaacacgcagtagtcagcatagtgtatgacataacatgtgctcagtaactattaaatttcattcctaccattgtcagaggtatttgaatcacaacaactccatcttgaataggggctgggtaaaataagggtgagacctactgggctgcattctcaggatgtctgtcagtcattctaagtcacaggatgagataggaggtgggcacaagatactgatcataaagactttgctgataaaacagcatgcagtaaagaagccagccaaatcccaccaaatccaagatggcgagaaaggtgggacgtctgctcgttctcactgctcattatacactaattataatgcattagcatcctaaaagacactcccaccagtgctatgacagtttacagatgccatggcaatgtgaagaagttactctatatagtctaaaaaggggaggaacactcagatctaggaatggcctaccctcttcccagaaaactcatgaataacccaccccttgtttagcatataatcaagaaataactataacaatccttagtctaccacctccaatgggggtgtatgcacctccaattctttcttggcgagatccaggagccctctcctggggtccagatcagaacacctttccagaaacaccatcccatgttaaattatgaattaagaacactgaacatgaagaatgtttaattcaaattattgagtaaacacttacaaaattaaaatataacatttaataaaaatagcaagattgaggaacaagcacttcacaaatattggtttcccagaatgtctgaggaggtgtatagaagttaagaatatgtcctccagccagagagatctgtgttcaatcacactatttaagttacttagcttctccaagcctcagtttcttaactcagatggaaaatgaggacaatgtaagcacctatttcactggattgtaaggaagaataaacaagataatgaatagtatttggcatataatctttcagaaaagtagtaaaattgtcattcctataaatctaactaatgtctttaaaattcatctcacaaaatcagtatctttttattttgtactgagctacttattttacccaaattgggggtttaaaaagaaactcattacttattttcgaaaggaaaatttactgtcaagtacagtaattttttttttaaagcagcgtttaaaaaaaaaaaaagacaaagcactggtccagatagttggaaatgtcatttagatttaagtctacagcttcttaggaaagttaggtagagatgtatcatactccagcatgattgtgagcagacgagcaggatgagcaaaacttgcacgagtaagagtggtaaacaccagagaaggcgctttcatggaagggcaccctaggtaaccaagcaagtggcaacaatagtacaggtgagtccttggatcccttctctctccacccccggcagtggtccggacaagtactaacctctcctctctagagccttgactttatactagctccacaaccatcaagccccacgatccgcgaaaggaatggtgctacaggtaaggcgggcggggtcgggatgccgagacctcttgtcaattcttcgctcgcccccaaacgaggatcacggctgcgcggctctcactctaactatcaagacagattctgatactaaacaaggctaaaactttttgttttttccttcttacagaaggcactaccctggacgccgcttgcaaacgcctgaagagaaggcagggtgttcccactttttcagaatgggaccaggccctacggccccaatagcagaagcttctctaacccaggactgctcccctcaattcctcccaatatgctgaccgacagctcgacctcacctgggggcggttccgccaggggatggcttaggaaaacctcaggaagagcagcccagcgagtgacgccactgaaaccacagtcatggtctacctcgttcaggccaccagtttgcaggcgcctgagccgctgctcctcccgcctctcggtccttccccgccgccccggtaccgtcgcagtcttacgcgttgcatgccgggagcgccttacctcctcttctcagggacttcagttcccagcatgcagaagcctcaggcagaactgcactctgggatttgaagtcctcgttccacgccttctcatcatcctgaacaccgagctctgggactccggcggagaatctaaacgtaaagcatcacccacggtcgtgaactgtaggctctcctggcatccgggatcttattctggccttggcggagttggggatggtgtcgcctagcagccgctgccgctttggcttgctcgggaccatttggctggacccagagtccgcgtggaaccgcgatagggatctgtcagggcccgcggccgggtccagcttggtggttgcggtagtgagaggcctccgctggttgccaggcttggtctaggtgggtggatccttgtaagcaggattagcgagtcactccacgctcaggttctttagcctgagggcccgtgtgccacagcatagctaccccgcccttccagcctcgggtccctaatactgccttgcttcggttccagtttccgccgcacaacttcactcattccaaatgttaatttctgcgttttttttcagccccaattctgtttctccaaatcagggatgattgtcggccttccacagaccctcgcgcttgccaggattagggtgttcgcgcgcattgtgggtaggggtgtggaggaagggatccagaaatcttaagtattaacttagattagtgttagcaaggaagccgtcacattttatttagccgggacactctgacagtttgtgccgactgctatttttgatcaaggctattttgcccacttgtctattttgtggcccaattgtctgttttgctaacatcagaaagttataatgaaataatctgcaaaaaatgtaaggtgctagaaaaccaataatactgtgtaccttgaaaatgctaatatacacctgttttgttacagaggtggagcacagtgaaagaattcaagatgccacctaatataaactggaaagaaataatgaaagttgacccagatgacctgccccgtcaagaagaactggcagataatttattgatttccttatccaaggtgcttaattggtcaataataatagatatatacattaacttatgattaatttattaataaaatatgaatttatttttttcagggacaactataattgtcacaatctggaagtgttcttatattttgcttgaaggttataaaatataaaacagttgcttttctgtttacttaggtggaagtaaatgagctaaaaagtgaaaagcaagaaaatgtgatacaccttttcagaattactcagtcactaatgaaggtttgtatgtagtaggttttaactataggtttggctattagtggaactataaaaatctgttcttatataaggtaatctttgtgaaaatacctggtaatatctacatcaccactaaaaaatgcaatatatttaaatgtgaattaagtattttagtgtataaaacattgctagtttctacttaaagtttctaaaagggtgtgtaggggaaatagaatgagtatgttgaaaagtaacataaggaaatatatcttgaggtccaaatgacaaatgcagacaatgactgctatagggatttgttaagaggggaaatgatttaagagatgtcagaagacttcacaaaggatcaatactgaggagtagtgttagataagtggaaggcaatgcagtggtaagatagtaagggaattctagagctgttggttaccataaataaatactgagaacaggaaatatgtttattctttatatttgaggaaacaaggtgcagcaagtttgtagcagactgtagagaaaacaaatcttgggtaagtactttgagataggttgttgagggccttaaaggtgtattttatgctatcagcaattgagaaggcagtaaaggttttcgaaacacaattgataggtacaaaaatacaccttaagaaggcaaaactgagtatattatgtaggacaaactgaaggaaattggagctttgtagacatcacattatagcggagtttaaacctgaaattatggattagaataatagcaattggaacagaaaaaaagtagtggaaagacattacaaagggagatgttgcattactggatataagacttgaggacttgaggtaaaaaggagaatcaaaaatgtttcatgctattaaaaatctagaaattgtagtcttaagtaagaaaattgcctggcatggtggctcacgtctgtaatcccagcactttgggaggccaaggcaggaggattgcttgagcctgggagttcaagactagcctggataatatagtgagtccttgcctgtacgaaaaaatttgccgagcatgatggcacaccaagcatgatggcacgccaagcatgatggcatgcacctgtagtcccagctactcaggagactgagatgggaagattgcttgagcccaggaggcaggaggttgcagtgagctgagattgtgccactgcactccagcctgggtgacaaagtgaggccctatctcaaaagcaaaaaaaacaaaaacaaaaaccaaaaactatttattcagcaaatatttactgaacgtctccatgtgccagccattgctggcactaaggatcataacaaataaaacagaatttttattttcagtgcttacattccagtataaaggcatattgaaataacctttttttaatgtttagatgaaagctcaagaagtggagctggctttggaagaagtagaaaaagctggagaagaacaagcaaaatttggtaagcaccttggaaaaagtttattatggtattaaataatgaattccatttgttcattaaactgtagaaaattaaattatattctataaaatatatatattcagtttatttttaatatataacatttaataataaatatttctagactcctattttatggatctgccatataatactttttgttaccttataatcatgatggactcttttaaaagaattaattttgttattgaaatttatttaaaagtttgttttgtggtaactaatcaattaaaacgtttttctttttttttaaaaaaatagaaaatcaattaaaaactaaagtaatgaaactggaaaatgaactggaggtatgtctttttgtattccctaggatgtaattgtcattaattttattttgaattgttttcaaattttaaaattattgttggctggaaaaattataaggatgattgtaatcatggttatttgtttattctgtatatgttctacatgcctattatgtgccttatatagtactaaggactgagcatatggttgtgaacaaaataagaagttaactgctggatggagcttatagtcttgggaaatatacagaaagattactagtaactgaggtggagggtgggtggggatttgaggaatagtgacgaaagggtgttatagaagtaatttttgacaaagctgaaggctaaaatatgaatgtattgttgaagaacaaaatacattgagattcctgagaaggtaggaatgtgatacaaatggatcagcctttgaaaggaggaatacccttttcctttgtgttaggagaggaggatgagtggatgagcgtgggaagagtggatgtgtatagaggcttttatgtttgtaggcataatgcttggaagttgaggggttggtgatgacatcttctgttaaaaagagtgggaaatggtgtggtcacattttaaggaaattaggtaaaatttgaaatatattggagacaggactggagagttggggatctggagtcagacagatttgagttctagtcctgattcttctactcgttaactctctgaacttggatgacctattgtttttgattgtatatccagctcctgggaaaatgccaagcactttcaataaatactaaatgaattatggagttggatcagttctgtgttagtgtttagctaggtagctgctgtagaatagaagggtagcacagttgaagatattggtaggaaagtggttgaagtgatgattatgaagtcttaactgaatagataaaatcaagattggggttgggtgggcagaagggtagggatatggagggagaagatgaggggttagagtgtcctgtgaggtcgaaggacaggcatagtgggaataattgaaagaatgttctggttggacaaggatctgatgtgggtgtgggagtgagagactatagtgaattcaagaaaaaaatagactagaacaaaagttatgtggagattgcttagtgggcatttgatagacatctgtgggccacatgcttaaattcccagtgcattttgcggagttactggaaggttggtggcttgtttctaccatgagtaggtaaagatggagagcaggatattttgtgagaaagcagctgaagtttctataggatgatggaggaatgataggaatgatcacctgaagttgcagggtggggtaaacctagaagcaccaacaccttcttctgaccctcatgtatttggaatctgaaagaatgagcaccttccaattgaaagagttccaagggcattagtatactaaaggatccaaattgcagctaagccaaggagatggaaaggaggattcagtaaagaatctgaggatgtgaaatattaatttatcttggaagagaattttagagagcacaatggaatgctttttggaggagagaaagagtaagaacaatttggttaaggtagaggaataacagaactataaggtgaagaaatgaatgtgagacacattagatgaccaaatgatttgatgttcttggccatgacctgaattaacaagactgtgaggtaaaatggatttaatcggctacaaatcttaagataaccaaaacctgagctgtttaatatggtagcactagcactaaccacttgtagctatttatatttacattggttaaaattaaaatgaaaaatttagttcttcagttgcactagccacacttcaaatgcccgaacatagctacatgtagcgagtggctattgaactggacagcactgacagcatgtccattatgctagaaagtcctatgggacagcactggtctaaacagtgcatggtatgagagaaagggcaggttaaggcactcagcttcactgactggggtggagattctgatggtttgtactcaggttccagatccctgaggctcaggaacctttgcagtttagtctggttacctgtggcccagtggttacaacagaatgattaacagtcaattctttgcatctctgggtggctcaggaaaaatttaaggagttattagctgtgaactaaccttaagtaagttaaattaaaaaaaaaaaagttcttaagctaatatgattttaaatatctgcactgaagtataatgcaaatttaaattcagcataattatttgcttgttgttgactcatttgaacctcaaaatataatgggattaatttatactttgggtttattactttaagatggctcagcagtctgcaggtggacgagatactcggtttttacgtaatgaaatttgccaacttgaaaaacaattagaacaaaaagatagagaattggaggacatggaaaaggagttggagaaagagaagaaagttaatgagcaagtaaagcactttttttttccatgaatcttcactgttcaagttacctggctttttattattattggtaacaatatcaatttttatattgtatgttatatttgaaaaatgatgtacacttatctctaaggttttatatcactgttcattttgtcatcaccaattttaaaatataatggtacttctagtgaatatgacttgaagattaattctttatatttggaagtacatttttctcaggacatcaaacttgttacctaaaattaatgcttttgtctggaagattggtatcaagtaactaatagattttcataaagaagtgatctttctagtgccatagtttattttgggtaaaagttatatttgttcatttcaatgtatttatatgattagtagattcgcaaatgaatctttcgatatattcaataatggttaattaaatatcttgtttttggttgtaccttattttatgtgagatatatatatatatgtatagtttttgaaaagttgtgttcatgtcagcagtttataaatcacatatttaaaataacatttttaatgcatagtttttattacctcgttattccttgttataaactaataattcttgcagtgttcacttgaatttagttttaggaaaaaagttttttgcagatcaacttgtatttcctggaagaaaatttcctattttacctcagcttcctatttaatgtattatttatttatttacttaacatttatttgttttttatttcacctgaactgttagtaaacttagtaaaatttggtgcctacatgtggtaactgtcctgtcccttatactcagaaacgttttccacctttgtgtcctttaggtcattgttgtgttatattccatttattttattttgtccattgttctctcagaaattgagggtcatacattttaagaaaacaatgatatgctatttaagagaatgtatcataaattgatttgtaaggaaaagtatccccattcttcatgtatgtattttactctaaaatgttgaagaatcatatagaagttagctatgaaaacaatgtggtagagaaagtatggatcgatgccacttaaatgttaggaagaagctcttagagcattatctgtttagctaactgcaaaacatagcagacatgtggattttttaatagtcatcaaggatctaacttataatatacactggtagaattgcttagggggatgtctgtggttttctggacttttgttcttctatatagacctgtatcagttgacttatcattcataccacacacccttagctaatcagaactaccttgtccatttatatcttagactattgtcttttttcatagtcacacacagagaaaacttgaatatatggcctgtgttcctttttggctgctcaattccttgagatgaaatatgggtatgggttgctttggcaattacttctttgccgttaaccagtcattcagttttattgagtctttacagcataccagaggctgctagttactagtgatatagtgggcaactatgttctggttctcaagaatattcatagtcaataataagcataacatagtgataatatgatacttagggagatacataaggtcatattctggcatactctggagagagataccgtaatcagccttgaggtgcaggatgtgatctgtaaactgagacctgaagtatagttagactggtaagaggaatgaggatatatatggtggttaataaaagaacattctgggtagaagatatagcatttgctaagacctagaggtaagagatgttatggagtatttaggaaactacagttattcattttgactgaaatataagtgaaaatagctttcatagagtccttactatgtgccaggcacttcatatgcattaattcattattgcttatttgatacttgtcatatgagatagttgtcatttctgccatgatacagatgaagaaatggagacacagaaagagtaattgcccatggttgcacagcttataaatggtaaaggtaggatttgaaaacagtcttactcaagagtctgtgctatcttgccttcccagttttattttttatgatcctctggagagataagcaagggccagttcctaatgaatttggttcttttcctgaaaggagccagtgaagagttttgagcacaggatatcatgatcagatctatactttaaaagtttactgtactttgtagagagtggattgaaaagggccaagactagtaaggaaacatttgtgttaattcagggaagtgctaatgatggcatttgcctgagaaagacaagtgtgagagaagtagatgtaattggatgtggtgaatgtaattggttgttggaggagagggaggatggagagtctgcctaattttgtgggttgggccactaaataggtagatagtgccattcattaaggaggaacacaagaggaatttggaaagcttgagattatttcagttttgtagatgttgagtttgaggttcttctgggcatattcaaaaagggtatctgtggatatggaattcacaagagaccctgtacagatgatgaggatttatgaatcatcaatgtagacattattgaagccagagaagtgattgtaaggcacgtctctgagaaatgtctaataaagcaatgaaataggaagagtgcttcaaggaaaagctcaagaaaggagaaacagagtgtgatgtttgagaagacaagggaaaaaaacattaatagcattaaatgctttagcattaagttcttggcttctcttcttgtaaaaatttcccaattcagaacacagtgggattattaactttcaattgataataataatgataggcaaacttctaaaatttgtattgtagtttgcattttattataaactttctttaaatttttattttgaaaaatgtcatatcttcataaagattgtaagaaacacactgttggtgttaatgtaaattagttcaaccattgtgggagacagtgtggcaattcctcgaagatctagaagcagaaataccacttgacccagcaatcccattactgggtatatacccaaaagaatataaatcattttcttataaagatacttgcacacatatgttcattgcagcactattcacaatagcaaagacatggaatcaacccaaatgctcatcaatgatagactggataatgaaaatgtggaacatatacatcatagaatactatgcagccatcaaaagagaatgagaggtcaagcgtggtgactcatgcctacagtcccagcactttgggaggccgaggcaggcagatcacttgaggtcaggagttcaagaccagcctggccagtatggtgaaaccccatctctacaaaaacaaaacaaaacaaacaaaaattaactggtcatggtactgtatgcctgcagtcccagctacttgggaggctgaggcaggagaatgacttgaacccagaaggcagaggttgcagtgagctgagatcgcaccactggactctagccttagcaacaaaactagagtttgtctcaaaaaaaaaaaaaaaaaaaaaccggaacaagatcatgtcctttgcagggacatgggatggaggtggaagccattatcctcagcaaactcacacaggaacagaaaaccaaacactgcatgttctcacttataagtgggagctgaacaatgagaacacatggacacatggtggggaacaacacacactgggacccgtcaaggggtcggggtgggagaacatcaggaagaatagctaatggatgctgggcttaatatctaggttatgggttgatctgtgcagcaagccaccattgtacacatttacctaagtaacaaacctgcacatcttacacatgtaccccagaacttaaaagttgatgggaaaaagaaaaacaataaccacccacatacccttcatatagattcaccagttcttaatgttgtgccaactttgctttatctttttgtcagtatttttacacacacatgtatttctctgtctcttgtttgttcaatcacattttttgctgagtcatttaagagctaattgcagatatgatactttgcacttaaatatttcagcttgtctgtttgaaaaagaaagatgttctcctacaatgaacacaatataattgtcatgctcaggaattttaatattgattcaacaccattatctagtccataatgagatttcttctaatggcccaataatatccttcagtctccccacctccaatatccaaagttctgtcaaggatcacatactacatttggttctttattatagactttttaaatatcgttgtataccattgtgattctatcgtctcctttaataaagaggagaaccagaaaaatgaaaggtcataagaggaatgaggtttggagaataggtgaaaaaaggcatcataatgtttataataatgtttgcctgttcagagaaacaagaatcacagataaagtcacttatatgtagataagagaatgctgtattactttttgctattctattcactgatcatttttctaagaactctgtatgcttcttgtttaactcttatgtcagcatgtatgagaaaactgagttaaagagatgttaagtaactcattcatgctttactagaaattggttgatgagggacataaacctaggccggtgtgattttagattgcttcttttaaccattgtgttgtattgccttatatttctaagtaatttatgttcactgagagcaaataatagtctagctatgacttagaaaagtaaaataaagatgttgggcagaaaaccattttattaggggtttttttggaggagcagattaatttgtttctgtattctttggttagtttgtgtgtgtgttctttttaattctttaaaatgaaactgtttaatccttaaatccttaagttttgaaaattttggcctattatttatgtgttaggttgatattaaatccttaatagctttaacattttctactttgttagagaggatttaaaatttaagtagataagctgaatatctggctttatattaaattactgctgatggccaggcacagtggctcatgtctgaaatcctagcactttgggaggttgaggcagatggatcacttgaggccaggagttcaagaccagcctggctaacacagtgaaaccccgtctctactaaaaatacaaaaattagccagttatggtaatgcatgccagtaattccagctactcggtaggctgaggtgggagaattgcttgaaccgggaggcagaggttgcagtgagccgagatcgcaccactgtactccagcctaggcgacaaagactttgtctcaaaaaaaaaaaaaattactgctgaattttatcttcttcttatttattttttttttttactattttagttggctcttcgaaatgaggaggcagaaaatgaaaacagcaaattaagaagagaggtaaaaaattttagtagttgtggtggttcaacaaaggtacttattaaaataagtacctaagtttacataaatttatattttaaccaggactggagtcttctaagtaactgatgttttcagactgattttatggtatgactttgtctcagggaaatagaaaacaaagcaaaatgtgaggccattaagtattacattcatctcaggtctatgcgggtaaatctttttttgttgttttataagccattctttgctagttttctaattgaatagatgactggatttctattcttatttctcttacccagaatcctttaaaattttttgttacttgtggaatcttataaattctgattatcatttggttctactgagccaaataatgtttgtacattgtttattctgatagaagttcttaagtttctaacataattgaaatattatttgttttggtagataattagtattctttctttggttattcaagataatatgcatcattttcccaaaatttttttgttttctttagtttctgattattatttttaattatgtattacctttctcatttctaattaccgttttcctgtccttttctgtagaacaaacgtctaaagaaaaaggtgaggctttaagtgtggtgaaatcttgggaatttaaaatatgttgtgagagcactatttagaggatatgattttgttattctgaatagttttgtaattgaatgttgtgtttggttaccttcagaatgaacaactttgtcaggatattattgactaccagaaacaaatagattcacagaaagaaacacttttatcaagaagaggggaagacagtgactaccgatcacagttgtctaaaaaaaactatgagcttatccaatatcttgatgaaattcaggtaaaatggctagaagtcaattcagagcaatggttcctaaaaactttaatttcattacaatgtaaatataatatttagccctacatgtaaattccctggtataaatctgtcactatgtacttgtaaaatgtgaaataaattacatctttgaagttgcaactttttagccatttttatatttgcctgtcttggtcattaagaacaattgaggtccttatgtactattttcttgattcaatttgatttaattggtcaatgccaattagtaaaggtctataaagaattctctttttttctagaggacacttatggctgcgtttaattttaatttggtttaaatttcagtttttttaaaattactttttaattatagtgtctttaacttttttagactttaacagaagctaatgagaaaattgaagttcagaatcaagaaatgagaaaaaatttagaagagtctgtacaggaaatggagaagatgactgatgaatataatagaatgaaagctattgtgcatcagacagataatgtaatagatcagttaaaaaaagaaaacgatcattatcaacttcaagtaagaattacttttagaataacttatttattcagacttcatattatctcattactatttatttgacactagaaagtactttttctaggatgtgaatttttgtctgtctttttaatagtgtaatatcttgtcatgttggtatatttgtccatatgtgtttctccaatcacctcacaaacactaatttttgcaatttaggatatataaatgatacttgaatgaatgtgtagatagcagtcattatggggttttctataaaagactactgaaaatcctgtggatcataacatttcattttatcttaaaataaatacattataaatgtattagaaaccaatacattgttcagtatttatgtggattaaatttgtttaaaaggtagaataatgtttaaaaataaaattttctagtaatgaaagataattatgcaattataagatgcagaaactattaaatgtcacctataattccaggatgacttcaatgataaatacacatatgtaatgtaatgtatccgtatgtatgtgtatataagtatgaatacgtatgtgtgtgtatgtagatatatttatatatataatgtatatgtaaatatgcacaggtgtaaatatatgttacatcagtttgcaacaactcttgaaataactttgtcttttaggtgcaggagcttacagatcttctgaaatcaaaaaatgaagaagatgatccaattatggtagctgtcaatgcaaaagtagaagaatggaaggtattttttttcaattgacataataactttttctttttgtattttagatttaaattttagtcttatttttctttaaatgtcttatactggtttataacacgtttattagggtttttaaacataagtttattttatttattggttagaaaagctctagaactgtcctttttgatctctagctaatttgttattgaatgacctctttcacatcaatgagtttaactttaaactttttgatagaagtctaactccaaaatatatttggcatctaaaatatataattcgaaatataatttaaatttttttacttaactcatagttaccttatatacattagttaaatagttgcaggtttaattttagtttttctaactaaatgtcaggttcatcagtgggaatgggaataagcaaagggatcagaataacttgggaagccttttcaaaatacacttttcttcctcaccaccactctccaaccttaaccaaattgtcaggccttaccatattagaagctgggattatgatggttgtatacttgaaaaacatcagagattattctgaatgaataattctaattttaaaaactatcacttctagagtcattgctttctagtatggttcacataaatcttgtgggcagtttggaactggttagcatctagggagctcagataacctatattttaaacaaaagcattagcaatggaaataaggcctatagaatcagtcatgtctccataaactttatataaagggccagacagtgaatattttagaccacctggtctctgctataactaaactctgcttatagcatgaaagcagccattgacaatacgtaaatgagtgagcaaggtggttttccggtaaaattttatttacaaaagcagatgggaggccagatttgacctttgggccatagtctaccaacccctggaaaaaacagttgtctttaccagattgaatgttggcagggtaaatggtgacatgttatatgtattctgtactttgttttgacttaataccatttcataattattttatatcagtacgtatagtattgctgttctttttaaaggctatgtaatttttctttttatacaggtgttaatttgataatttgtgaagtttatgaagtttccaattttggggttgtaaactgttttaatgaatatccttatatatgttattttgcaaatgtacaagtatatctgtggaataaattgctgcaagtgttgtaattgtcatgtatgttgcaaatacattctaacagtttgtcactttttttgctttatggcattttttgctgtgaaatatttctttttatgcttagttaaatttattattttttaatgacttttgacatttgttataatgagaaaggcttctgagtataaacttgttttctcatcttttctcctaatatcttgttttgtttttgtttttgtttttgtttttgagacagagtctcactcagttgcttaggctggagtgcaatggtacaatctcagctcactgcaaatgccacctcctgggttcaggtggttcttgtgcctcagcctcctgagtagctgggattacaggcatgtgccgccatgcgcagctaatttttgtagttttagtagacatggggtcacactgtgttggccaggctggtcttgaacccctggcctcaagtgatcctcctgcctgggcctcccaaagtgctggaattacaggtgtgactctgcctggcctttttttacatttaaatcttcgaaacatataattcattttgatgtaaggagtatcatgtggattcaacagagctactctgttgtccaaacatcttttattgattatttcatcttttattgaattgattgatctattttctagcagtgtatacttgttttaatttgtgtatgttttaatatctaaaaacgttattatttttctgcttttagacttctttatgaatatttttaatgtgaattatagaactggcttgtccagttcttaaaaaatatcttgtggatttttattgggtatgtgttaaagttataaattgttttatagattgatttaggataaacctttttatgttatttggtccttctagctaaagaacacaagataccttttctttcattcattcaagatattttatgcctcttggttgcattttaatgcatacttcataaagatcaattgtataaaacttttcacagttgtatggaagtacttcttgtttataaatgagttttgaaaggttgaaatatttttaaagattgaattataaaaaaagaaaattcggtatatattttaaaatcattttctatttgaatttcaggttgtatatacaaaaggaacagagattatgccagtagttgctcatactttctcatttcaaataatttttattttctgtatcataaatctactaacggtgtttattatttatgataatgaagaatgttttattaactttccttttgcataacagattctattgtgtttatttctagctaattttgtcttctaaagatgatgaaattattgagtatcagcaaatgttacataacctaagggagaaacttaagaatgctcagcttgatgctgataaaagtaatgttatggctctacagcaggtaaaatcttaacagaattttgtttatcaaccagttttattacagttggaactctgaacgatgtcttttatttattatatcatcagtgcctagtgtagcggctggtactaccaagtgtataataatgtcttttgaaatttcttctaccacctggtcccaataaaaaattagaattaagtttagatcacggattagacttagaactagagttactgtgtttatttttctatgtttatgtggatagtacacacattgttttggttagaaattatttaacaagaaatgattaaaaacttttagaaatttaaaataattttatactcttttaaggtttattttactgtatcttagtcctaacataccctatacaatgtgaaataagctaaaagcatggttataatttgactgtgctacctattttatttttagtgaaaataacccaaataaaaggaagtaatacttttattatttgtgctgtagttatagtccacaagtaagaagatgatttgaaaagtgtatgctgaataagaacaattacaggggacaacattttttaataaagtacgaaaggggaaaaagctaagttgaataaaagagaaagcacagagcaaaacagaaacatacaaaatggtaaaaaggtggaattgaatggaggatgaggaaagtaacatataaggaagtatagaagccataaacattagggagttctggaaatcctattttccagagtgttagccattatatccatctttcagtattggagtaacagcagtgtacctatcattgtgtattacagttgaagtgtacaaaatggtaaaaggcatacttgtacccacaagaaaatatgttctacagtcttgttgaaaaaaatcagacgtacttttttccttacctttttaggttaatattcatgaagggatatatattgttttaaaatattttatagggtatacaggaacgagacagtcaaattaagatgctcaccgaacaagtagaacaatatacaaaagaaatggaaaagaatacttgtattattgaagatttgaaaaatgagctccaaagaaacaaaggtatttttataaatatatagttattttatatacaattatgtttttaacgactttatttttattaaaataaaatgtcaagtcaatattgagttttctccatttgaattttatattttcaaaaaattgtacaagatatttattattatacttatattactagtgcttacatttgtaaatgatggatgcattttctattatttttctcctctggtgaaaattacattaacgtttattaccaggtcactggtatgaaagaaatgaaaaattgtgatacaattatttttatttaactttttataattaacaaagaatggaagataataaaattttgaccagtgtaacagcattgcagatagttttcagaggtaatttcacattaatcttacccaaattaatgtttcatcatattctccttaccctgagccatattaccttttttaacacatcaaattctatgaatataagttcttacaatatctgtgttgttatatttccatagcactacatactatagttatgccagggcacactagtgcgaactgttcatgggaaattcatggacatgtttattataattggtgactatgtatatatgtatacactacatttatacacacgcgcatggaatcactatttcttcttcatgtcatatatatatacatatatacacatatatatacatgtcatatgtgtgtgtgtatatatatatatttgtatatatgacatgaagaagaaatagtgattccgtgcacatatgtgtgtgtaagtgtagtgatgtgtttgcaggtacggttgtaatttcaaaaatgaagcaaaagccttgctcaggagataattgaaccaatacttaaaggaagtaaaggagtgaaacatgcagatggctctaagcagtgggaataagttcaaaggcagtaaagcaggagtgtaccaatcatgtctgagaacaacaaagaagtctttttggctggagtagagtcagcaagtgaggcagtgataagaccagagaggtaaacagaggccatatcatatggggccttatagttcattgtgcagacttggcttttaagtgagaagggacaccggggaaagtttctgaagatagaaatgatataatttgacttaggctgtgtttgcagtagactgtaggagtggtaaataagaatcagggagacctgttagaagactattgcaataatctggagaaaagtgatggtggtttggggcatggtggtagcagtggagttactggatgcagcagttctggatgtattttgaaagtgataaaaatggaatttgctaacagatcagatgtaggatgtgagagagagagaactcttggtctgaaccaaaagttttggtcatggtggggttgtgggaagagcaggttgagagataatcaggtacttaattttagacatgttaggtttgagatgcttattagacattcaagtgaaggtgttaagtaggcacttgtatataaaagtttaaggtttaggacaacaatctaggctaaagatatgtttggtaactgtctctgtaaaagtaattgaaataatgaggctggctaagatcaccaagggagtaaatgtaggttaagaagaaaaatctaaagagcttctactttagcagctggggagataaaaaggagctaccaaaggagactgaaaaggaaagcccagagagctaggaggaaaagcaggagtatggagagccctgaaaaccacatgaggaatgtaaccaaggaagaagaaacaactgctttcagagctgtgttcattgctgctgataggtcaagatgatcactaaaagttgactattggacttagcaatggtcatttttggttcaagagaaaatgggtagagaggaaatgtaataaagaaatataggaacccttttccaggactgtttctataaagagaaggagaaaacaaggtggtagcttgaggggaaagagggattaagaaaacatttttctctttaagatggaagaaataactcatgattttaggttaataggagagctccattaaagaagaaacattaatgaatcaatgaagtggagagagagaacttctggaacaataatatttttaagaatgcaatgggatgggatcctagtgtgccagtgaagaggttggccttaactaggaacacagagttcatccataattgtagaaaagaaggtagagtgtatagatatcgatgtaggtggcttggtagacatcctggtaatgggaatttgtggaagttctaaactggttgctgcttttttctcagtgaacaagggagcaaggttcttagctgaaggtgaggataggagaagatgtttcataagtttgaggagaaagaagagaagtgaaagtataaaatggtcatctgaaagattgaagacgtggagaatgtggtatgactgttgagtaacttcaagagcccacgatatatatatgtatttctatttatgtgtttattatatttgtatcagaacactttgaaagtagtttaaactgctttaaaaggatgactaatagtatggattgtgcgtattctaattactaggagaaaaagtggcaattgatctctgctgtcaaataaggaaaaggacttatctgataacactttagtcagtccgtagttatataatccctaaagctcacagaaggtgtgtgtactagactgtactctacatcttgaacttaacttgtaaaacgtaatggctaatggtattcttccttcataagattaggattaggtttagttatcaggaacagagagctgaagaataatggcaaaatcaagatagacatttatttctcatctatgtaatggcctagaattaagcattccagggtgttgccttcatctgccccatccaaaatggatggaatgcagctttatctcatgtctgtgtcccaaacagcaagacagaggaagaggggcaagagttaaaagcatgtgctgaaggataggcaggtaaatatagtgtttattgtgtagggccatgtggaagaatgataggagaatagatatgtggatggaagggagaatagatactgggggacaactcagcctgtgtcatgttccacagcttagatgttagctccagacagctgtgctcatttcttaaaaacttttgtgatctcaaacgtactagttttatgcctaagtccaatattaaatatataacctatatattagtaaatgcttataatgaatgagtgtgagaatgatctgtcaatcaattttggaatgatagcaatattatgttttggtcttttaacaatttagtaagatattacaagtaggcatttaggaagtttttagcttagtttggattaaatttagctgcaagtgacagaaaaatcaagcataatacaataatttaaacaagatagaaatttatttctctataatatagacaaagttgaagcaactagggcaggatttgtgtgacagatgctcaaatatcccctatcaggaaccctgtctcttgttgctgtgcctatctcaacatgtggtttctaactcatgtgaagttgccaccctcatatccatgtggatttcagctagcaggaaggaggaaagagaagagagattactcctttattttaaaaacatttttttttttttttttgaaattcacatatgaactttgcgtttatattccattactgacatgaccacacatagctgcttgtgtgtaagtggaaatttagttctttatttcaaatggccacgtgtcaagctaaaaatccatagttttagtacagtggacaaaagggaggttaaatattaggaacagctagcagtctgtatcacaatgatcattttttgtaaagcagtattttgcaaccttttaaaatccataccccttcagctaagaaggttttactgaacttcagttttttagtaaattgtattagtaaaaccaaaacaaaactttcatcttacaaatataaaatgacaactttaaaggatttttttttaatggcataccacttttcttgccaccatgttgggatcactgatttgaaggaataagtagtcaattcaattcatgatttttgtttttactctgtaggtgcttcaaccctttctcaacagactcatatgaaaattcagtcaacgttagacattttaaaagagaaaactaaagaggctgagagaacagctgaactggctgaggctgatgctagggaaaaggataaagaattagttgaggctctgaagaggttaaaagattatgaatcggtatgtatttttatcttgtcattcaaggagcttagaattattcttgccattcacagactattctgtgctatttactgcataccatttaaaaaacattccataagtatcttttgataaagattatcctcattaatttatactaaactattgaaacctttgagcatttactttttgccagaattgttttcaaacttttgatcacagtgatttgtccaaataatcagttttggtgaagcagcaggattacttttttttattatctgtgttcattgggccaccatgtagatgtgacaccactggccaatttgacagaatttatgacaggaacatactgtgtcaatacaacctgctctccactttttatactttttcattggttacaactaattcaagcaactaatgacttacttattctactggtattgctgatttgcttttactaattcttttagtattttggtaagtgttttttatatgtaatgcatattcagagtcactttgcctttaggatattatactggaaagttttaactgttgcatattacatcattattattactggatttggtttataaaagcacaataaaaaaccagtgtaatgatataaattataggcatatgtacattttcctttagacttagtaaaaaaaaaatcatgaacttgataaatttattcaagtaaaccatgttatattttaaattaaattggatatttttcagggagtatatggtttagaagatgctgtcgttgaaataaagaattgtaaaaaccaaattaaaataagagatcgagagattgaaatattaacaaaggaaatcaataaacttgaattgaagatcagtgatttccttgatgaaaatgaggcacttagagagcgtgtgggtaagccatgttttaagttacatagtttgcgcaacctgatttacaagtctttttttttaatttaaattttgtttattattatttattaagtagtttaatgcttttttcaaatgcttttataaaacatttaatacaaataaaagtggagctaacctgattgaagtggaatcagattttatggggttggagtggtgggtgggcagggctggaacattgctttatttggtctagcatctcctcagtaatagctgcttgtttaaaaagatgaaagtttattaataccacatatcagagattaacctttttttttcccaacaaaagtagggtctgtattacccatgtttgtttgcaaaatgctcttgtaacagatgagatatttaaacttcttgctctgtgttgtgattctcctgcctctgcctcctgagtagctgggattacaggtgtgcaccactatgcccggctaatttttgtatttttggtagagatgggatttcaccatgttggctaggctggtctccaactcctgaccttaagtgatccacccgccttggcctcccaaagtgctgggataataggcatgagccaccgcgcctggcctgttaaaatcttttaaagatttttaagtacttgatttttataatttagactacttacgttttactttgttcgagtattttaaggagtaattagtaatatagcttgagagtttatatatttattttaataaatagcctattagttaatattactaatttgagtgttatgatagtgcagactaagttgctgctttaaaatgaaaataaatatctaaatatcaatttcattattgctaaatttcatttaatgctttcttagttaaaaatgatcatttgtaaaaactattatctaaagaaaagacaaatagacaaataagtattttatacagatatatatgtgtgaaaagtatctaacttggatccgtagttgtgctaggaccccaaattagacttctgatcaacttggactatcagatcacagccttctgatcaacttggactatcagatcacagccaagaatctggaagttcctaaagatgacttctggcccgtctaggtagctgtcatagacatcatattttctgtgcttaaaaagctccaaatcttggtttataatttcatttaggtttttgttaggatttccattaataattgtgataaaattttaacttgggttacagtttaaatatctggaaaattctttcacagaaagttacctcattcttcagtgatactggctaagtgaattataaccagttgcttgatggtatatgacatttttgcagcttatttgaatgtttttaagtttttaattatattgctttctattgtaggccttgaaccaaagacaatgattgatttaactgaatttagaaatagcaaacacttaaaacagcagcagtacagagctgaaaaccagattcttttgaaagaggcaagtgtggtagtcagttgattattttcttggctgaactatagagaaatactaataatttatactttgcagattgaaagtctagaggaagaacgacttgatctgaaaaaaaaaattcgtcaaatggctcaagaaagaggaaaaagaagtgcaacttcaggtatactcagttattctaaacctttaaaaagaattattgataagtgagttgtctggatatgaaattatttgtgtcttagctgtttttgctgttctattgtggatctgctacaaatttaataaatgacaataataacctgaaggagataagtgagtgtcagtgggttcagtcctgaatctgaaatagacaaaaacaaaacaaaacaaaataacaaaaaccaagcaaacaaaaaagaaaaaaaccttagaattatggaatttttgaaaagttttatagtatagtattttaatttctagacagcaccaatatgttgttattaataataataaaacttagtagtttttatgttaatatatgttactcaacattttccctttccttaaggactatgcattgaaaagcttttcttgtaagttattattattattattattattaatatttgagatggagtctgtcttgttctattgcccaggctggagtgcactggtgcgatcttgctcattgcaacctccgcctcccgggttctagtgattcttgtgcttcagcctcctgagtagttgagactacaggcgtgagccaccacgcctgacttatttttgtatttttagtagaaacagggtttcaccatgttggcccaggctggtcttgaactcctgacctcaagtgatccatccactttggctccccaaagtgctggaattataggcgtgagccaccatgcctggccttaaattattcttttctaagtgaaagtaatgttttattgaatataaattaacatctttcttgggtttattttacttgagctaaagagaacagttggttaagttttataatagccattgcagtgcttttttgtaagaagaccacacagaaggactgtctttttcacttgccccaaatccccaagcacgtatatgagtaatagcagagtggttctttttagcattatgatttctataatacatccaaaactttctcaagaaaaaacttcatgatttattagtacaataatcagtttactcattactcatcatttatatttactttatatgtcttttaactggtgcttattaagtagcactttaatatagaataggcaaagaatggtagagaagatgaaattcaaaaattaggttctcacattattaatagttcattaaaagtgagctaaatgagaagcttgtattggctatgtagaattttggagggattttggaaacaattattctacctttgcattaaaacttgattgtaggttttaagaattaaagtgttggaatagtaggagggttattttaatgtttttagtttgttaattctcttatatataggattaaccactgaggacctgaacctaactgaaaacatttctcaaggagatagaataagtgaaagaaaattggatttattgagcctcaaaaatatgagtgaagcacaatcaaaggtaatagtaaagtattgcaaagagagtaaaggaaaatatttttttttttttttttttttgagacggagtctcgctctgtctcccaggctggagtgcagtggcgcgatctcggctcactgcaagctccgcctcccgggttcatgccattctcctgcctcagcctcccaagtagctgggactacaggcgcccgccaccacgcccggctaattttttgtatttttagtagagacggggtttcaccgttttagccgggatggtctcgatcttctgacctcgtgatccgcccgcctcggcctcccaaagtgctgggattacaggcgtgagccaccgcgcccggccaggaaaatatttttattgtgttttcatttcttccccctttatctcattcttgaacatctaatcttattattgttgttaaataagtagagggaaatatttgcttatttaacctgttgattcaaagattgattaatgagacattatttactctgaatacagattaggagttcagataaagcagagctgctgcataggagatcatcattcaataccccacagtcagatcagaatgagacagaagagaatatgaccataggatcattatcaagaatgttatctgaaattcaccatagtgtagaaagtggaatgcatccttttgtccctttaactagactttcttcatccatgcaagttaaagagaattcaactccagaaactattacaataagagagatttttaaagcaccatgtctgcagtcttcaagaaatctagaatcgttagtcagcacctttagtagggaaagccatgaagaaataaatgacatatgccttttttctgatgactgtatgaagaaggtgtcaagaagccatcaagcactagagaagactagttttgtacaaaaaagcaattcatcttttcatggcttatcaacagcttcagacataatgcagaagttatcacttaggcaaaaatctgcaatattttgtcaacaaattcatgaaaatagagctgacatggataaatcacaagtagcaacattagaagaagaacaggttcattcccaagtaaagtatgctgatatcaatttgaaagaagatataataaaaagtgaagtacccttacagacagagatattgaaaaataagcttaaggttaatcttccagaccctgtgtctattactgcacaatcaaaattatctcagataaattctcttgaaaatcttatagaacagttacggagagagctagtatttcttagatctcaggtgagtttttctccaaattatatttctgtggttgttcttttatgacgtctctaacaaagttctgtaacaattatagttagaatatttttgtttgcactttaacatcagttatacacattgtactttttaaaatctaaaatgcagtacattgatatgaactcattgacttgtctaatttattaaatttttctttagaatgaaatcatagcacaggaattcttgatcaaagaagcagagtgtagaaatgcagatatagagcttgaacatcacagaagccaggcagaacaggtagtgtaaaggcagaacattaaaagagatgattgtggtactaaagacaaaaaccgttatatctttttgcctcttaccatggatgttgggagagggagaaagtgggattaagatcaccatctgctttactgtttagattttagtttatttttatgattgctgctatgtcttcatagctcgttttttttgttttgttttgttatacttaattgatcaaacttttcttaacttgaaaattatagacttgtgatattttgttgaaaaaaatcaattttattctctctgcttttttcagaatgaatttctttcaagagaactaattgaaaaagaaagagatttagaaaggagtaggacagtgatagccaaatttcagaataaatgtaagttacaattatcttttacttttctgttcttatttttcctatacttaaaatcatgggcctaaaagggcgttaacacattctctgttttctaatctgctttactcctaattacctctgtactgtatatacttcagtctgtcactatccagttgatttgccttgctgttttcattgtgagagaatgttactaatatgaattttttgtgagaatatataactcctttttcttgtgtgttcttcaatcaaaatgaagttagaacaccaaatttaaaatactttaatataaagcatagtttaagttaaggcagaagtatgccttatatacgtgtgtatatgcacgtgatataaataggtctgtcatttaactcaactattcacgttggatttatagttgaatttttttgtatgtttatttacatttggatttttccaatgatgtctttggtatatgtgaaatatttgtcatctgtatagcatagtgtaaattgtgaaaaagatctgatcatccaatgagaaaactgtgtaattacagtaaaagaattagttgaagaaaataagcaacttgaagaaggtatgaaagaaatattgcaagcaattaaggaaatgcagaaagatcctgatgttaaaggaggagaaacatctctaattatccctagccttgaaagactagttaatgtaagttatttttttcatgttaatgtttttcccctatcactttagagagattttctgctgtgtacagatctccatagtttctgatgagatatttttagtcatttgaatcattgtttccctgtatgtaaagtgtagtttttcttgagctgctttcaatacttttcttctaccaattggataattgttattaatctgtcttcaagttcactgacattttcctctttatctgtgttcttttggttcaagggtcagcttgagaccttgaggagttttttacaccgactttggagctcgtttttgctgactcttttcttattgggattttcctttcacttatcccatggctttgggctgtatcctgtggttttctagatgagaaagatgatagatctctgcaattgcaccctgccctatgactaaatctttaaaaatggcaaagtcaatctttgctggtcctgtcttccgtatttgaggggttttttcccaaaatctgcttgcttttgttcattttctagaacatctaggtagttttttttcattcattttttatttatgggagtgtagatctcttaggaacttatgccatcagaagtattatgaaatggctttattctaaatgtttaaagatttactcattgctacaagaaagatttagccatcactaatattctatatatatttaccatatagggacttgagaatttcacaggattcagtatctgtatataaacttgaataatatacacattttagattgttaatatttaagtatatgtcatttatgttatctgaacatatttagcgtacattgtcatattatttcccaaatttgtgcttgatttcaaatgggaaaaaaattcttattatttattgaattgtttttttaaaaaaatcatgattaatcagtaattggatactttttaaaataacactataattgttaacagagaatgagagtgatactggtatgttaaaaacttcctgaggcaagaaaataatttgattcccattatatctttctcatactgactttccttctctgattggtgattttgttttgcctctgccactttgaatgtctaaaatgattctttatgctttttttatgtgaacatcttttgtccgtgatgatgcccactactgatactgtgtcccagatcaaacttaattttccaagggcagctctacttagtgaccaaatgaaaacacagtgaatagcccaagaaatcctaacttctatttatgttgacaatctctggaccttcctgaagccactgtttgcatagacttcatttacttttatccgggattgtcattgttttttcagattcataggccctatctgaaattcacaaatcacctagcaatacttctctaagaaatcttcagaatccatgacaatttagaccagacaatgctggattatgcacttcagttcactttttgttactacaaggtatttttcagtgcccccaacagctatcttaactcattctcattttaccaaagtccatgtagacacggcactattcctcaatgagacaactaactagaccaccttgttgtcagtcagagtaccttcctctacctacttttatcttccttatatcctctttgagttagtataagttattactctgcatgacctgctctaatctccttcaggggaaggcttttacaaatctactacctagagttaaaccccagatcaccttcctgagtaggagattgcatttggttctattcattttaccttatttggcttctaccttcactttttaagacttactttgcctttaacagttttttccatacagttcatctaaagtccaaatatatttattagatgtgtgcattgtgtgtatatacttagatatgccactgttggagatttcgggccagtgatgccactctgataatattttaatatttgacatattatttttgcttactcattattcttagataatatcatgttatgataccttgcctttatttttatttatgcttcaactatgtggagaggaagcactgaaaaattcacttaattgaatgttgtattgatcaattgttcaatattgtattccattcctttgcgcatgctttgaatgcaggtgctatataatttcagagaaaaatacctcattttgactgtacaaaaaccccatgtagggagcagagctcacattgttttccccttttagagacaagaaaactaagatacagagaatttaagtcacttgcccagctgttaagtgactgattaaaatttgaaccctggtcatcttattcccgtctggttgtttttctagtctaccagtctattaagattagctaggtgttttttaattgttttaatgaagtaattactatgcttggtaatgtaaatgaaagttttatagattcataaataagaatttgaattggcatactttattatcatgcttggcaatgaaaataggaaaatgcttaaatgtccattttatttaaagacagactgttttttactatgattttactgtttttctccacatttctaatatataatataaatttgctaggctatagaatcaaagaatgcagaaggaatctttgatgcgagtctgcatttgaaagcccaagttgatcagcttaccggaagaaatgaagaattaagacaggagctcagggaatctcggaaagaggctataaattattcacagcagttggcaaaagctaatttaaaggtgagaattttattaaataaaagaaaatgctaaacataagaatgtagatttaataggaaatttttaattttttaaaaagaatgctttatgagaaaatgccccttgaattaattctttcaatattaagaaactggatttctcttataaaattataagtggaaaataagtgccttataagattgaaaagaatacaaaaattctaaatctcatacctaggcatttctaagcagaaactgaagtatggttgaggtaaaattcctggcagggcattcacatatctgtcaatttgtctttctttgggtgtaagagttgtgattctcattgctggatttttttttccagatagaccatcttgaaaaagaaactagtcttttacgacaatcagaaggatcgaatgttgtttttaaaggaattgacttacctgatgggatagcaccatctagtgccagtatcattaattctcagaatgaatatttaatacatttgttacaggtattgaaaattttgttacaggtattgaaaattttacatgtgaataacaaaaatcattggtagtatgtttctttatgtttttatttttattttactttattttaatttttccatcaccaaagcatgcagatagtacttttctcaatatttagtcttcatgtattcctgagttctcaaaatagtaacagtgaaatatattttttatggattttgatgttagatggattataaataaaagcaatttataccattcattccattcatctgcatgagcagcatgttcatacatcttgttcgcacacctgtcattcatgtgaaatatatggttcacaagcagaacaacaagcagctattataaagcagtgttaagtaaatgagcacttttatttcttgctgggtggaaaacaaaagaataaagtctgtcaaggctttttagtgtcatgatagaattgttcccctttttgcattcacaagtaaaaactactttttttttgagacagagcctcactctgtcactcaggctggagtgcagttgcgctatcttggctcactgcaacttccacctcctgagtttaagtgattctcatgcctcagcctcctgagtagctgggactacaggcatgcatccctggctaatttttgtatttttttttagtagagatggtgtgtcgtcatattggccaggctggtctcaaactcctggtctcaagtgattcgcctgccttggcctcccaaggtgctagggttacagacgtgagccactgcacacagccataagcaaaaacttctaaaccaaattattcttcatctttgtcttccctttacgcaataaaatgttaatctaccaccaaagaggaaagggtactctactatactacctgccctgggtttctcagttttgctgtctatataatggtcgttatgaatgtcctaatgacagatccttttcattattttatttgaaatttgactatctataacatcacatacattataaatataattacaaatatatgttcagaatcaatgaaaatatatttttgattatatgggccactatttctctctgctaggtgatccatttgtgagtatacttgagttataattattaagtactcatttttattttggaaattacagtaattcatctttttctcaatattgggatttttattattattttatgttgtctaaggacagccttaactacttattagaatattgctttgtatgtgatattattatttttaaatgtataattttaacattattatttctcttatttacctgaggtataggaacactatcagcaaatattggtagtatggcattgtcgtattttttgagataaaattcatgatttttaatctttgtataagaaatatatcagaagtttgtagtagattagagagtaccaactgggagtctgaaaagctgtccaaagtggcaaaacaggtacttagactctcaatcctaaggctgtatagagctataaacgtggcaagacctttggagtcagacagacccaaactcaaatgttggatccatgtatatggaaagcacctgacaacaagcctagcatatgtacttggtaaaaatgattgccaagtgtagtgttaatgagtttttggatattgagtaagttatttaaatttcaatttcatctttaaaatgaaataattggaaaggataatttgagtgagggtatgaaattatgtgttcataagagagggtatgtggccgagtgactagaggcgagtttataactattctatctaataaaactttgtaatctggtaatttgtgtgctaaaaataactttacctgttgtatagtactctttttttatgccttaaactaaagtgttcaaaatatcatggaaaaatgatctgtgttgcttacagatttggtgacttttaactttcctataatgttgtcagaatatgaatttatactttcaaattcagcatttattctattgtgtttttttttgcattcttatttctaaaccacttttcaggaactagaaaataaagaaaaaaagttaaagaatttagaagattctcttgaagattacaacagaaaatttgctgtaattcgtcatcaacaaagtttgttgtataaagaatacctaaggtataggtattagcaaaactataaatataattgcagtatattcttgttaattgtgaaagtaacgtaagaataatttatgttttgttcttcccttcttcttcttcctttgcaattgtatttttttttactctggtaactactgttaggaacttatttatggagacagtgtagcttaatgattacattaagcctgggattatcctgcctgggtttgagtcatttaacgtttgctttttgtaagagcttgagcaagtcatcttacctatctgtgtctcagtttccttatctgtaagttactttgtaagtaatacccttttcataggattattgtaaaacgtaaatgaattattagatgaaaatgctcggactagtgtgtggcacatatgaacagtttgtaaatgttagctgttgttagcatcattcatcatcatcacaatcatcattgttcatatatgtttatagggaactaacatatttctccttatttctgtcatctcatctaaatcaatagaatgatttccttaataggaattagaatacctaatcaaaggtgatttaaacactaagaataattattatctgacctaaccagaaccacaaagctagttgtagggcaggtcatatttgaaggttgttgttatcgcctatgatggttgtaaaatagctgcatgaattcaagaaagatgatgtgcccattgaagaagaggagcatttttttctacatagcttttatttttaaataaacatttttttctggtgatacctggcagacattgactccgatctcatttgctagaattggatcacatgtccaagtctgaaccattcagttgcaaagagaatgataccgctatactgggtttatgccaagaacattacacatgtttgtggaatgctcatgtgtagacaacagtgtcttacacaacttcaaaaaaataatttatatataaatatgttttaaattactttttaaattcacaagaatttatggtatacaacatggtgttctatatatgtatatactatgctatacaacatggtgttctatatatgtatatactatgctatacaacatggtgttctatatatgtatatactgtggaatggctaaatcaagctacttaacatatgtattacctcgcatacttttttttttttttccttgagacagagtcttgctctgtcacccaggctggagtgcagtggcgctatcttggctcactgcaacctctgcctcctgggtccaagttattttcttgcctcagcctcccaagtagctgagattacaggcatgtgccaccacgcctggctaatttttgtatttttggtaaagacggagttttgccatattgtccacgctagtctcaaaattcctagcctcaagcaatctgcccaccttggcctcccaaagtgctgggattacagcatacttcttcttatttttttttttttttgcactaagaacacttaaaatttactctcttagcaattttaaagtatataatatactgttattaactttggtcactattttaattagacttaagatgtgtttgtattcaaattattttgtaagcatttaacacccaaatttgagagtggggtcagaatgttggaatttgatttctagaattagtatagggtattattttcctactttttttctgtgttcaataaaatgtttataagattcagcttcaattatattataacccatttagtggtgaatcagggaagaatgaaaataatttgataactttgttgccttgcatttatttaaaaaatttttaattctaggctaaaccctttttaaatgaaagtttaacttcttgtgttttcagatactgaatagctatgatacctcttgtgttgagaaaactttaaatttgcataatctgaagttatcttttcttataaacattttattaggtttacagtattgtctttttgttttgttttgtttttagtgaaaaggagacctggaaaacagaatctaaaacaataaaagaggaaaagagaaaacttgaggatcaagtccaacaagatgctataaaagtaaaagaatataatgtaagtaaaacatttttaacattagtatgcaatattgtacaaagtaggatagctagattcaacaagtaatatggatgtgtctttgtgcagaatttgctcaatgctcttcagatggattcggatgaaatgaaaaaaatacttgcagaaaatagtaggaaaattactgttttgcaagtgaatgaaaaatcacttataaggcaatatacaaccttagtagaattggagcgacaacttagaaaagaaaatgagaagcaaaagaatgaattgttgtcaatggaggctgaagtttgtgaaaaaattgggtgtttgcaaagatttaaggtacatctgattcttattttgctttttctgactatgaaaaatttcaaatatgcagaagataggatggtatcaataatgctcatcacctgaattaatagttaacatttattaacattttgtcataattgcttcttctgatttttgtgggatgtttgaattgcagacattcctcccctaaatatttaatgtacccttttgaaaaaggcttttttctttaactaaccatagtaactttattatacctaacaaaatgacagtaattttctaatatcgcctaataccctgattatagtcacattttttacattttttgatcaaagaataagcatttggatgttacatctcataaatctttttaatatagaatccccttggttttctttttctccaaaaaatgtttgaagatgtatctaacttttgtgtgtgtgtcattttacttgttcctgtgtcccttgtattactaaaagttaggtcagaaccctaagttacattcaggtttaaacatttttggcaagaatacttcataagtagtgttctatactttatattgcatcacttcaagagtatctggttgttccatgttttgtaattgattactctgttaaggaaaagacaagcagaccaagtatggtggctcatgcctataattccaacattttggaaggcccaggcaggaaaatttcctgagcccagaccagcctaggcaatatagtgagactccgtctctacaaaaaatgtttttttttttgtttgtttgtttttaattagcttggtgtagtggcacatgcttgtaatcccagctacctgggacattgaggtgggaggatcgcttgagcccaggaagttgggggctgcagtgagctgtgatcatgtgccactgatctccagcctatgtgcctgtataacagagcgagtctctctcttaaaagaaaaaaagaagaagaagaagaagaaaagataaccatatacctccattattaagcaatttagctaactggtgatattttggtaccatacaaataacaaattatttgtcagtcctaatgattttagcatctgctgatgattgttgcctaacccaattattaaaagttgcaaacatcataattttctagttatattatgcacttacatttattaacagacatgcttttgtaaaataaatagcgtttcctcattagcccaggctatttgtttatcttgaagtttagctcctactacaaaggcaagataaatgcttttctctttaattaccagttttcagaatacacacttggtgtactctgcactacctgctttttttgtcccctccgctttctcttttttaagtatcagattagactcacagatttttaaatattccatgtgttttagttggagtcatattcttttgtctcaactttagccaaagagagtcctttaaagttgactcttatattgtcttgacaaaaattcattagtcttttgaacgaagcctcaaagcttgacttgttttctagcataagatgtcttagacttacctacatacttcatgcccatacttggaataaaccatttctttaaagagcccaggttccttttagtggggaaggcatttagataccaaaaactggccactgggcatcattgctctcagagtatcattgccactagtctctcagtagacaagttagaaaaatatgtatatatttaaaccatgagttcatattgttatttccagtttaattataacattatggggtaagtaaatagtatcggatttttactaagcttctttgattttgcacttgtatttttttcttacatagaaaacctttattattaacattaaaatatttgttttatcctacaatatacatacaataatttgaaaaataatacttgaattgatattaatagtaacaacaacagcactgctgccaaacatagtttaaagttttatttcaggtcttattttcttcagaatatatcttgctgagaatgtataggcaaagtattctacacttacttgaaataattgtcttcatgcggttatgttatacatttgatatatagttaggctcatttgtttttcattttttttattttagggatttttttcctttattgaattttaatatatacaatatttatatatgcaaaatatttaatcagagaaatcttaattctggtcttacgcctttcatattattctgctccaccctctgtaggtaacttattatctttctcatgtttcctttttggaaacataaacaaagacaagacaggttacatgacatgtatacccttctgcacctagttttataccttaccttgtagtttatttttaagcatgtaaatgttcaatgttcatgactaaatttggacaggatcataggaacacagaattcaaagtgaaattaaaatgggcttgggttctttactttccactttaaaggttgtaatgggtgatgtcaggctaataaacctattttcagcttgatctaaagcttaatactgagcatcaagaaattctttaataaatataagtgatatttattcagacatgtaataaggaaatgttcatgtcttatttttgtgttagatttttttagaatctacttttgttagagttttataaatacagttagtgtttgagatagaaagagaaaagaattagttttcttcctcttctacctgctcatgaacttgatttttttctcccaacaattgaagagccaagaaaaagggagattcttaagagatgggaaatagaatctcatctacccctgtttcccccagaacagtgaaactgaatcttaagggtaagatagaatagtgtgtacttaacttagatggagaagaaaggctgccaaaatgagatctgaagcgctattacaaatatttccatcgttactgtacttcagaatgaattacaaccgtaagtttttttacttcctcattcataaatttgattattccttataccacttctcagctttcatcattctttattgtacttttctatgtaatgtttgcctattatacagcaacttaagagaactgtaagtttggacatttcattttggtgttgataatagaatatctttgaatagttctatagttgatgagtagaaccatgaaccaagtaacttaaagtccttgatgttatttattacagagaactataatagaagctctcccgctaatgtttccatcatgtgtacaaaaagttttcttgttattaaagctagtccgtttaacttacaataagcataaatagctaagctgtgaaagttacctgtgataatgctaattttcccatttattaaaaggcaagttgttttccgatcataagaaatttagaaaagccatccaaagataaattccgagtgatatattcctgctgtttgttatgttttctcaaattaattgagttttattttacaatgacaggagttattaaagtattttatttttattatgattaagattttcaaagtaacatttcttatatgaaagaaattatgttaatgcatgtttttcttacatgggaaatcatatattttaaaaatgattttaaaattcgttttactttaagttgtattatctttctcaaaagtggctagtgcttgaccagaaaaaaagacaccagcataactcagtgtatctttatttacataggaaatggccattttcaagattgcagctctccaaaaagttgtagataatagtgtttctttgtctgaactagaactggctaataaacagtacaatgaactgactgctaagtacagggacatcttgcaaaaagataatatgcttgttcaaagaacaagtaacttggaacacctggaggtaagtttgtgtgattcttgaaccttgtgaaattagccatttttcttcaatatttttgtgtttggggggatttggcagattttaattaaagtttgcctgcatttatataaatttaacagagatataattatccatattattcattcagtttagttataaatattttgttcccacataacacacacacacacacacaatatattatctatttatagtggctgaatgacttctgaatgattatctagatcattctccttaggtcacttgcatgatttagctgaatcaaacctcttttaaccagacatctaagagaaaaaggagcatgaaacaggtagaatattgtaatcaaaggagggaagcactcattaagtgcccatccctttctcttacccctgtacccagaacaaactattctcccatggtccctggcttttgttccttggaatggatgtagccaacagtagctgaaatattaagggctcttcctggaccatggatgcactctgtaaattctcatcattttttattgtagaataaatgtagaattttaatgtagaataaatttatttaatgtagaataaaaaataaaaaaactagagtagaatatcataagttacaatctgtgaatatggaccagaccctttgtagttatcttacagccacttgaactctataccttttactgaggacagaacaagctcctgatttgttcatcttcctcatcagaaatagaggcttatggattttggattattcttatctaagatcctttcacaggagtagaataagatctaattctattagctcaaaagcttttgctggctcatagagacacattcagtaaatgaaaacgttgttctgagtagctttcaggattcctactaaattatgagtcatgtttatcaatattatttagaagtaatcataatcagtttgctttctgctgcttttgccaaagagaggtgattatgttactttttatagaaaattatgcctatttagtgtggtgataatttatttttttccattctccatgtcctctgtcctatcctctccagcattagaaagtcctaggcaagagacatcttgtggataatgtatcaatgagtgatgtttaacgttatcattttcccaaagagtatttttcatctttcctaaagattttttttttttttttttgagatggagtttcattctgtcacccaggctgagtgcagtggcacgatctcggcttaacgcttactgcatcctctgcctcccagattcaagcagttctcctgcctcagcctctgagtagctgggattacaggtgtgcaccaccacaccagctaatttttttttttttttttttttttttgaggcagagtctcgctctgtcacccaggctggagtgcagtggcgccatcttggctcactgcaagctccacctcccgggttcaggccgttctcctgcctcagcctcctgagtagctggtaccacaggcacccaccatcatgcccggctaattttttgtatttttagtagagatggggtttcaccttgttagccaggatggtgtcgatctcctgaactcgtgatccacccgcctcggcctcctaaagtgctgggattacagatgtgagccaccgcacctggccccagttgtaattgtgaatatctcatacctatccctattggcagtgtcttagttttattttttattatctttattgtggcagccattattcctgtctctatctccagtcttacatcctccttactgccacaagaatgatcattctaaacatgaatcctaccctgtgactcccatgtgactccccgccttaaaaactgtcaaaagctaccggttacctgaagggtaaaagtcaagtcccctacttacctcatgtcatctagagcaagagatgaactagctgagttttctgaccacagtgttctttcttatgtatgttcttttgtacgtgctcttttctatatatagggaaccatttctctcttccagttgttttgctcagtgaatttctattcctgtttcaaaacttgttcaggcattaccttttttttcttaagcatactttttttaatggaacaaagtcactcctgtctacactagttctgcatcttatacataggttttgtacatagtacatatttatatcacatcaaattatatgtgtttacatatctgtcttccttaatggaatataagtcttttgatataaggaactatttaatttgtttctgtgtgttgagtatctcctgtttggcacagagttcaagctaatacatgagagtgattagtggtggagagccacagtgcatgtggtgtcaaatatggtgcttaggaaattattgttgctttttgagaggtaaaggttcatgagactagaggtcacgaaaatcagatttcatgtgtgaagaatggaatagataataaggaaatacaaaaactggatgggtaataaagcaaaagaaaaacttgaaatttgatagtagaagaaaaaagaaatagatgtagattgaggtagaatcaagaagaggattctttttttgttgtttttttttttgaaacagagtctcactgtgttgcccaggctggagtgcagtggagtgatcttggcttactgcaacctctgcctcccaggttcaagcgattcttctgcttcagtctcccgagtagctggaattacaggtgcccaccagcacggccggctaatttagtagagacagggttttgccatgttggccgggctggtctcaaactttggatctcaggtaatccgccagcctcaacttcccaaagtgctgggattacaggcatgagccactgtgcccagcctgtttttttttttttaaaggagaccagtgaagtttcaggaggagggaaagaaaatttagagttactagggagagagtgatgaagataagagatgaaagtggtaataagggaaatagcaaaatatcagggtaggtgggagaaaaagagatttgtaacaaacaataggattatcctgtgaaaaaggatgaaaggaagaaaaaaatggatagaaagatatttaaaacaccctcagcctcctgttttccctcctgtgtattcatagtatataaaactataattatgtactttacttaaaaaatatattattattaccttatcgtgcttatttaatcatagcatgtcctctttttagtctcattaccctgtttgtattattcttcataacacttaatacctgacattgtattatatattggcttattttccaggtactccactcaaatataagttctaggatataatttatttatcactgaaatccattgcttagagtacctggcatgtagtaaataggcattctgttttttcaaataaaaaataaaggaacttaagatatatatttatgttatatcgccagcctttttcctcacagctctattctgttgtacagaattacctactttacaattcctgtgtttcaaggggatctcaaatttaacgtgtccacaatgaactcctgatttctgtttctctcctagtcattcttatttcaatatatgttcagttacctaaccagctagtcaaggcagatactttagagttattctgtagtcattctttttccctaccatttttgttttccaaatgtaatttatgtgtgtcttcttcatcctcgcagctctaacccttgtccaaaccagcatcatcactcatctggagttccacaatgtctttctggctagtttccctgatttctctattgacccctttattctccacagtgcagccagaatgattgtttaaaacttcctccttaaaatctttaaattgttttcttttatacgttaagttaaattccagttccttgtcttggcatgccatgccctgcctggtgtggcccctgatggtctctccaacttcatgttttactactattgactcttatttttgcttactctgcttgggtgctccagtcctccaaatcatttcctgctccaatcatttcaatcattttttcctctcagatcttatagtattccaaatgctttcttcctttggagcatctgggtttactaataaatacttcgtacctcacagttcagcttaaatatcaattatttggtggttaagacatccttcaaccgctctatctaaatgttcctttctattattcactggctcagtactctgtttttattttctttctaaatgtcaacttttttttttttgagtcagggtctcactgttgcccaggctcgagtgcagttgcacaatcatagctcattgcagccttgccctcctgggatcaagtaattctcccacctcagcctccaaaatagctgggattacaggtatgcatcaccatgctcagctaattttttgtgtttttttgtagagatgaggtctcactttgttgcccaggctggtctcaaactcctggactcaagtgattctcccacctcagcctcccaaagtgctggggttacaggtgtgagccactgcacctggtcgatactgacttttttttttttttgagatggagttttgctctgttgcccaggctagagcgcagtggtgtgatctcagctcactgcaacctccacctcccaggttaaagggattcttctgcctcagtctcctgagtagctgggattacaggcaagtgccatcatgactggctaatttttgtatttttagcactatgtttagtactgtgttggccaggcttgtctcgaactcctgacctcaagtgatccacccacctcagcctcccaaagtgctgggattacaggtgtgagccaccgtaatcggccaacattgacatttttagtagactttttgtttgtttacttgcttattatctgctgccttccacactctggcgaaatcctgccacccacccacacacacataggcactgaatgggcagaactctgaaggccagaattttatatttcttttcactgtaaacatcatcatctgtcactgatggcacactaggatgctcagcaactgtgtgcatgaaggaagtaagcactagtttgtgaaggctgcaaaactcttgagtattctaagagttttggccaaaatgaatgtacagctttagtggcagaagctaatactcagaaattgaggccgtatattggataacacaggatttggatgattattttaaaataatattttacattgtatatatgtgtgtgtgtgtgtgtgtgtgtgtgtgtatgtgtgtgtgtgtgtatatatatatgtatgtatgtgtattagtccgttctcatgctgctatgaagaaatacctgagactgggtaatttataaaggaaagaggtttaattgactcacagttccacagagctggggaggcctcagaaaacttaacagttatggcagaaggggaagcaaacacatttttcttcacatggtggccggaattagaagaatgtgagccgagcaaaggggaaagccccttataaaaccatcagacatcgtgagaacttactattatgagaatagcgtgggggaaaccacccccacgattcaattacctcccaccaaatccctcccatgacatatgaggattatgggaactatgattcaagatgagatttgggtagggacacagccaaaccatatcagtatgtatatgtatacaagtattatatatatatgtatgtgtttgtatgcatacatgtattatatatggaggaaattctaattttgtaaaaaactggattgtgagttttaaggagatgttatataaagttaagacaatgtcattttgtggtattggtctgaattacaatgtagtttcttagtgatatttttcctttattcagtgtgaaaacatctccttaaaagaacaagtggagtctataaataaagaactggagattaccaaggaaaaacttcacactattgaacaagcctgggaacaggaaactaaattaggtaagttttatgactctgataatataaaatgattaacatctaataatgaatatttcttatttaaagttccttttttatgctagattaaaaggaagtattttgactaaaaaaagaaagaactttctgcctaataatttaacttaggcagatgaataatcctgtacttaaccccaccaaagtttagttttcagtccttaagttagatttgtttctaatgaaatcatatatgttaaaaatttatgactaagtattagctactttgaaccgtttaacaattaaaactgatgatattttattaatggtattatgagttctttcactgagtgcaagttatattagttatatatcacttgatatttttaaattaaaagataccaggaaacagcaaagaaaatgtgaaaagaagttgtatttctcatagttttactactatattactgtatatttttgctcctatatgcttacatattttatatattttaaattattataaacatggttttatactgtatttagatagtaatatcaaaaatatttttatggccggcgcagtggctcacacctgtaattccagcacttgggaggctgaggagagcagatcccctggggtcaggagttcgagaccagcctggccaacatggcaaaaccccatctctactaaaagtacaaaaattagccaggcgtggtggcagttgcctgtaattccatctactcaggaggctgaggcaggagaattgcttgaacctaggagtcagaggttgcagtgagccaagatcataccacagcactccagcctaggcgataagagtgagactccgtctcaaaaaaaaaaaaaaatttgttttattcatcatacttataaatacttatacaatagcctaatgtgtttgagtgattaaatcactagctttttatatttttgctattgcttatagtgccacagtgaacattttcatgtatatctaacagagatattactgtctcagaaggtattgaaatctttgttgctctcattagagttttccatattaatttttcaaacagttatatagtttataagattttcataattttatctcatatattgtgcttcataattttcaaataaatttgctgctttcgataatgtattttcatgtatttgtttcctagacgttagagctattcaaggtttttattactaaatagagctgttctcttaaattggtaatgagatacttggtttagagaagcctaacactgggaaatcttacataagctacttttagaaatgtaatttttagctcaataagagattaaatatgaattgacttttgtgtagtatttgcatggaagaaggtaccatttaaatgaagacatgagagtattacgtacaattttagtaggttctttttattttatcatctttatttttaataaatgctgaattccctacagaaattctttaatttttacatatcttgatctctttcatatatggatttatatcaccgaagttttaagagtgtttccctattccctgttgcccttatatctttgtttaaaaatgtcacatcattagctttttttcatctaggaatttgttagtgttgggctgttgtgctctaccctctctttaagaaaactccaaacccaaaaacatacaagatggctagtctgcttcagcctttgtgatgtgcttttctcttctaatcagagtttagcacaatacagaatggagaaggactcctttatatattggtatttattgcagtatttttctacatggtgcctaaggttacttgaatgagtctttattccataatgaactgatttactaatgcttttagcacctgttagtgatccattattgttagttacttgattactgcttgccacagctattctaaaataatacattttaaagataaatacagaacataatgaagtactttttaaaactgagatagagaccaatttttttttcaggaaatgtatattactttgagaaaactcagttataaaacttgaacttatgaagctggaaaaacaggagggggcattattggtattgtaaaaggctgtttacaaagtgagttgctgcttagttcctttaagtaattggctaccctaaacacatcagttttaagttgctgaaaagcaaaacactctaccaaattttgttttttttctagaccatgtttacaaagcaaaagtatgttttcttccccccccctcaaaaaatgactaatgacactcctatgcgatgcctttttatggtaaattgaggcttttagttctctttccatttagccacagacttttgtgtccaaagacaagctgcgtaactgcatatataaggttaaggcataactactaataaaagaatgtaaaatatttgatattaggtctgtacaaagaccaaataatactcatgattagacaagattatatttggtagaatctatccatcatatggcttcagattttacttttcagcttggctttgtgagactttaaaaatcaagtcattgcacttatattcacaaagtcacattgctttactgcattgcttctcatacagtttatctcctttcagtaaaatgtttacttgccatttttaaaatttcttatatgtgacacttctacactaagtcctttatgttgttagttccacaattctgtgaggaataggtttttttttttaatcatttgattgatgaagaacattaagttccacagagattaaatggtacaggcatcacacaggcaggaagtaacagagctaagattagagtccaggtctgatggaattcagaaagctaatgtgctttccatggaactataatgctttctaatatacagcatctaaaatatctgaggtaattttaatataaacagcatgagattgacttaaatattattgcatgtaggtaatgaatctagcatggataaggcaaagaaatcaataaccaacagtgacattgtttccatttcaaaaaaaataactatgctggaaatgaaggaattaaatgaaaggcagcgggctgaacattgtcaaaaaatgtatgaacacttacggacttcgttaaagcaaatggaggaacgtaattttgaattggaaaccaaatttgctgaggtttgatattataagttttatcatacaattatagaataaagaattagttttggtagacattgtattattgttaagtggtttgtctggatctctgaaatatcttattaatatagtgcctatgttttgtgtaataaataaataaaagatttaaatctgaattgtttaaaaggaaagcagatatttctgtaagtttttctcaccaatgttatattattagatttaatttatgaaatgttatttactaaacaatggaattgcctttcaccaccatcccttcatttaacaaatatttattcattgcctattacatgtcagaccctgtgttgggactggcagtatagcaagaaacaaaatagacaataatctctactttcagggactttacattctaattggtggttttatatatttttgatgtggtcagaatcattaaactgtgtggcagtaaatatagtttgcaagtatttaacaatttatgattaaacacaactcttacagtgtttgcttaccttgagatttaatatattttcaaagcatttatatcatttttgttttaactatgtcactaaatctatatgagtaagattttattaactcatttggatttatttatagatgatacaattgaagtaaaatataatgagcagattgcattctaagcaaagtaagaatattgcaagttcagatattattagataatgagttgcctaataaaaatgacttttggtggattggaatataaccagagtttccatagtttgtttctgattctttcatattttttaccctccttcagtctgttcttaacacttcacacttaatataatatgtgaactaaggccaagtaaagaggattgcagtactttaaaagctaaattacaaagaaaacctcaccaaaaattgatgtatctgaacattttttgttacatttccttagcttaccaaaatcaatttggatgcacagaaggtggaacagatgttaagagatgaattagctgatagtgtgagcaaggcagtaagtgatgctgataggcaacggattctagaattagagaagaatgaaatggaactaaaagttgaagtgtcaaagtaagtgcatataagcattttagccatttgactagatgtatcttctttaatttgtctttaagaaacccaattacaggtatacaattcttagtagtaattgatactgatttctttttataagaacaggattaagtaatattaagatcggttttaacagggttaaataataatattgacgagaataatattgttaaagaggaagtgacctctcaagatttgcattttttagagttcaggaatattattgcagaaaggtccagttcctccacatattgattttttggggaaggggtgatggaggaggaatggttgtttattgtatttaaacttaagtttcttcattttaataagggagtaatagtacctcttctacctgtttcataaggttgctgtaagaatataataaaaaattcagattttgatttagtttacatttatcgggcatctactatgtactagtcacggtgcaaggtattaaacatatattgacttgtacaattatacttaaccttgaggttatatttttgttttcattttacatgaagaaatatgcccagctagtttagaacacaaaatatatataaggagtaaatactgcgtgctggctgggcgtggtgacatgtgcctgtagccccagctactcgggaggcagaggcaggagaatcgcttgatcccgggaggtggaggttgcagtgagccgagatcgcgccactgcactcctgcctggtgacagagcgagactctgtcaaacaaacaaacaaacaaagaaaaacaaaacaaaaaaaccgtgtgccagctatatgctgtattttcattctcttttgtaattaggtgatatttcagtagaaaagtataaggagcacttagttaatctgtcaagcataaatagtaaaaatattttatggcctactcataaaaatataaccattcctttggagccttgatagttctcttgggaatatcagtttttgacatctttttcactatgaaagacccttttttttaaaaaaattgatcctttcttctcatggacctcttttgatataaactaacttataatagttcattttaatcatattttgttaatcatgcaactggcaatgagagcctctcatcagtatgaggaaacctgccttatctataatactgaactaaaattattctaacccaaagcaaagaaactttacattttgctttgcctgtattagcttatcacagtattcatgagggaatttgaaggacttattaccattaggctatctctttttttttttttttgtaattttattaaatgcatgttttgtttcttttcacattactgataacttgtagattaaaacaaatcaaaacatgcattaatccatctaaggatcctagaaattttacatttctgtgttcttaactgtgtgatggtcttagataaatgtactaaataccttatcctagcatattccaaattatgacaataaatgttttatggaaaaaagtatgggaacagaagttctttggctatatacatttggaaaatactatatagtaagtatgatttgagataattatatatgatagaacctctgggagcactgaatatatgttaggaatattcaagagggaggagggatgttgagaatgaagttttttttatatagcaaacatgataacctctgatggaattatgtttcatgaaacagtttaggaaatcctgttttaatatttcatacaaagaagagatagatgctgaaaacgaatggctttttgaaaaagggtctagaaattttgaattttggcatttacttagaaagtgtacttaattgttcctgaaataccttatcatttcctagactgagagagatttctgatattgccagaagacaagttgaaattttgaatgcacaacaacaatctagggacaaggaagtagagtccctcagaatgcaactgctagactatcaggtatgtgcagtattggctcttctacatagaatccacttttttccctaaatttacattagatgttgggagtgggatatgttatactttttgtttgtttcgagatagggtctcattctgttgcccagggtggagtgcagtggtacattcaaggctcattgcagccttcaccacctgggttcaggtgatcctcccacctcagcctcttagacagctgggactacaggcacgtgccaccacacctaatttttttgcattttttgtagagacagggtttcaccatgttgcctaggctggtcccaaactcctgggttaaaatgatctgcccaccttgacttcccagaatgctgggattacaggtatgagccaccatgctgggccattgttacatttttaatcaaaagatataccaaccagaggctgttattcttgttagttggaacctgattagaaagctctttaatttgaaatattgttcagtaatccagtacagcatttaaatgcctatagatgaattatgctgctgatcaaaattaggacactgagaattgtagttagtaaatctttaataacaatattttctcttgtatttatatgtaactttttacatattcttacgttatatatgttgggaattataaaaacatacacattgtcctgatcagtattatgttacttgcaatggaggttaaaaaaaaactgtaacagtcaggcatggtggctcacgcctgtaatcccagcactctgggaggccgaggcaggcggatcacgaggtcaggagttcgagaccagcctgaccaatatggtgaaaccccgtccctactaaaaatacaaaagttagccaggcgtggtggcatgtgcctgtaatcccagctacccaggaggctgaggcaggagaattgcttgaacccgggaggtggaggttgcagtgagccaaaatcacgccattgcactccagcttgggtgacagagtgaaactctgtctcaaaaaaaaaaaaaaaaaacaccagtaacatacccactgttattcagttacatttggattttaagtttgtttgattctaggttttttcttttacagttctttggtaattatttgtattaaagcaaagttacatttttgtagatctcatgtgccactgtgttaaaactttgcttagtaaattgtgaattttaaatctgtgataactttcactggaaaaatttgaaacttactacaaatatatattttttttaatatcaggcacagtctgatgaaaagtcgctcattgccaagttgcaccaacataatgtctctcttcaactgagtgaggctactgctcttggtaagttggagtcaattacatctaaactgcagaagatggaggcctacaacttgcgcttagagcagaaacttgatgaaaaagaacaggctctctattatgctcgtttggagggaagaaacagagcaaaacatctgcgccaaacaattcagtctctacgacgacagtttagtggagctttacccttggcacaacaggaaaagttctccaaaacaatgattcaactacaaaatgacaaacttaagataatgcaagaaatgaaaaattctcaacaagaacatagaaatatggagaacaaaacattggagatggaattaaaattaaagggcctggaagagttaataagcactttaaaggataccaaaggagcccaaaaggtaaacatttaaacttgatttttttttttaagagacagtatcttgatctgtttcccaggctggagttcagtggtgcaaacatagctggaactcctgggctcaagggactctctagcctcagcctcctgagtagttgtagctggcagtacaggtgcacaccaccatacctacctaattttttaaaatttttaaatttttttgtagagacaaggtctcactttgtcacccaggctggccttgaactcctggcttcaagtaatcctcctgctttggtctctcaaaagtgctgagattacaggcatgagccactgtgcccagccaattttaaattcattatcttcaaaagagttacatgataatttcttaatatatgcctatatgaaaaatgcttaagatacaaattccaattatgattcattaatttagattttataacttagcagtgttggctatttgaatgtctattatacgtaaaaataaaattaggcttttctaaccaaagattttagtgggaatgttcagattgtataatagcaaagaattttaattactataggaaaatttatattaattaaacactaattattatatttaaacattgtagtagttatcagttgatttctactgttcataattatctttgatctacaagtagtgggcccacatttacttttaatatggtttaatcttcatttagaaagaattaaatgaaaaataattatcttgcaactacatcctgttctctaggctagaaacatttaggatttctgtttttgaaagtaataccaaagttccaatgacctgcttatagtcagtgttcaataaacgtataacaaatgaaagtgaatattagtgatgtccattccaacataatttgaagatttttattgtaaaatcccacatatttgtagaaaagtctatggaaatcctaaataagattttgtcatgtagtttgacaaaagataacattgtgtcttattttattttagaatggccattactttcaattaaaatcattatcatcaatggaggaatgttatttgttaatatagcatttatatttgtgtatataaattgtaaatcttaggtaatcaactggcatatgaaaatagaagaacttcgtcttcaagaacttaaactaaatcgggaattagtcaaggataaagaagaaataaaatatttgaataacataatttctgaatatgaacgtacaatcagcagtcttgaagaagaaattgtgcaacagaacaaggttttattttatatttatttcatttttttccctaagttttttttttttttttttttttttgagatggagtctcactctgtcgcccagactggagtgcagtggcgtgatctcggctcactgcaagctctgcctcccgggttcatgccattctcctgcctcagcctcccaagtagctgggactacaggcacccgccaccgtgcctggctaattttttgtatttttagtagagacggggtttcaccatattagccaggatggtcttgatctcctgacctcatgatccgcccgcctcggcctcccaaagtgctgggattacaggcgtgagcccctaagattttaaacaagaatattgcacaaatgactatgttatccttctaattaagtgcaccttccattactaattgattatataataatttgttttttattttctaaactattctaaaaattcatatttatttagcttttataacagtagtcttaatcttaaaaacggcaatacataagcaacctcatttggtaagttaatttttattttgatattggttatttgacttttcacagttccacgtttctactggctctcactgatagagtaagaagtcagcttcttatagaataaagtatatacttcagagacagatgaaattcgtcaaacatatgactgtctcagagattgttccccctgcttaaattgttcttaccctagatacctttggtatttacactgtcagtgcctgcaggtcttagctcaaatgtcttaccttatcagtgtatccttcaccagccacctaatatacaacagtaaatcctactatccagattcctaaatagagattaattaacttaatttttctccaaagtgcttgtaaccttctgacgtattacatacttactggtttattattgactgtctttccttcgccagaatgcaagttccgtggtgacacggacttggttttgtttactgccatgtttgtatttcctagaatgatgcttggcacataatatatgtcatcaaatatctttcgtatagctgaacggatggatggatggatggatggatggatggatagactgaaatccttacttcacatctgcctttgtgatcttacacaagttacttcacctctctgagtttgtatttttttccataaaaggaaaataattacagtttcttcaatgtgttgtgaggattagataagaaaatatatataaaatgcctgttatgtgcctgatgtcttcgtgtatgtgtctgacacaaattgtcctttttttagtttcatgaagaaagacaaatggcctgggatcaaagagaagttgacctggaacgccaactagacatttttgaccgtcagcaaaatgaaatactaaatgcggcacaaaaggtatgaatgattaatcttgtttgttactctgtagcatagtctagagtgttaactcacagaaatatttcctgtatcagatgtaattttaattgatgttatattgtatatttaaaatataagaggggtttaatctatgttttatcatacagctgtaaaaattaatagttactctcaatgctgcaactgcttttttaaaaaacatactatttcttaatagtttgaagaagctacaggatcaatccctgaccctagtttgccccttccaaatcaacttgagatcgctctaaggaaaattaaggagaacattcgaataattctagaaacacgggcaacttgcaaatcactagaagaggtaattagaagaatttgcattttgattagtgtattatttggtatgtttggggggctttctaaataatatttctttatgagggcaatgcatagaatgatgaatctattgctaatttcactatttttctattctcctataatgtttctaatagccaataatgaacagcagatatagttaatttgaattcactatttaattattagttggtacctttcggtacactgaatatgaaaggaaataaaaagcatttaattgtagttctatgagcaatatattctcttatatgatctctttattcttacttttttggttttattttgaagtgcatgttacataatctatgaatcaattttcagttcattgcctttaatgcatggttaaagggttgaaggtaaattagaaattactttctgttttaacctagatcttgaatttgattagtaggtgatcaaatctgtcatcttcattaaattattcagaaaataatgtaaactgaatgtgttttcattttagttttcatctaaataaactgcaaatacatttaaaatatacataaagaagtttttcaagtaaaactgtacatttttaatcatttcaggaaacgtagattttcttcagtaattttaagatttgtcatttatgtgaattgccattgaattacttaatttaaaatactcaccttaatcctcttgaagagtaaaaatttttctgtttttttctctttgttttaataagctgcggattttatattcgtaatttattgagttgggcctctaaaattccagttttgtacttaactgacttatagattagtctcctaatgctctgctagtcaatggaccaaaataaaagaaataatttattacatattcttcctaaatctagtaccaccatacatgtataattctaaactgtaatatctcaataaagtaccttaattaaattttatgttcatcataacaatgaagtttctagcatatgtaatagtcttataaataagcatgcaaataactgctgtcaattagaattagtcagtttaaccttattaagtatcaaatggctattgtacatatgatgtgaaaaataaagtgaattttttttggctaataactaatctaaaattcagatgaagcattttaaagggaaaaagatactttaatgatttattataatttaatcattgcagaaactaaaagagaaagaatctgctttaaggttagcagaacaaaatatactgtcaagagacaaagtaatcaatgaactgaggcttcgattgcctgccactgcagaaagagaaaagctcatagctgagctaggcagaaaagagatggaaccaaaatctcaccacacattgaaaattgctcatcaaaccattgcaaacatgcaagcaaggttaaatcaaaaagaagaagtattaaagaagtatcaacgtcttctagaaaaagccagagaggtattttattatattatgagttatgctgttatccattagtttttttaagcaaatgctaaatattattttaccctaaagtggtatttcttttcttgctttcaaatgattctatttaagaattgttacttgcatgtgattggattacacctctgtcagtaaaactggaagtttgtgtacatgtatctttctattatacactgactaaaccacgagtagctatcatggtgaaatcatatgattttgaaaaatattttaattgagtttataggtgaggattgaggcaatagggtggaatgaaatatatcacaccggtaatcagtagaaatcagatttgttagaacttcgtgggggaaagctaacatttaattttttctagaagtaagttaaaagatgatagatacatgtcattctaatgttaagaataaattatgaactgaggctgggcttgtcaacttgaacattgtctgaggggacatgcataccagtctagatacatacatatatggagatactgtttcttcctcatctcaaaggaattttagaagattgaagagaaaatatataaggtcttcaaaatgtgaatttgttttaatcacaatttaagatatagtttcgattttctgtaaaacaggagcaaagagaaattgtgaagaaacatgaggaagaccttcatattcttcatcacagattagaactacaggctgatagttcactaaataaattcaaacaaacggcttgggtaagattctaagaactttgttccattctttattgatttttgtgaccatgtaaattaaaattcagctctcttcttttttggaatggaagttaccctttttgttgccaaaataatcttctgaaaacatagctctgatcattcttcctcctgtagctcaccgctgttcacaaaattatatttataattcttagccatgtactcaatctgctatgaacctacctgcctttcttttcaaattctactcactgtgagtttagctatatctaacttccagaattcagctcatatttgcctcttttgaccattctgttccatatgtatgaaatgacatgtctttcatcttttaatgtgtaaccttagcatatttgagcattacctcgttaattcggtcaacacttattgatctcctgctacgtgcagacattttgctagctattgtaaatacaaataataaagtctgcatttcctgtcttctttaagccttcattgcctattaaatcattacattttagattagatattatattttgatcatttgaggaaccaaattaaaaatatggaataagtatggcattgaattatacatgcctattgctaatatattcatattttataggatttaatgaaacagtctcccactccagttcctaccaacaagcattttattcgtctggctgagatggaacagacagtagcagaacaagatgactctctttcctcactcttggtcaaactaaagaaagtatcacaagatttggagagacaaagagaaatcactgaattaaaagtaaaagaatttgaaaatatcaaattacagtaagtcttcgaaatgtattgtaaaaataggcaaatgataagtgatataatgaagataaacataagtgtttgctatgccaggcactgttctaagacttttaagtatattgtctcatttttatcctcaggactgctggttacatatgttatcattttccccattttaaagagaggatatggcctcaggaatgcttaatagcatgtctgggggtagatgggaaagccataatttgaaactagtcagtctgactcaaaagccaatacaaattcttttccagaatctcatttttaccttctttgagcctcagtttcatcttatttatttatttttatttttgagacaaggtctggctctatttcctaggctggagtgcagtgacataatctcagctcactgcaaccttgaccttccaggctcaaaccatcttcccacctcagcctgcagagtagctggcactacaggcaggtgccaccacacctgggtagtttttttgtatttttgtagagacaaggtttctccatgttgcccaggctggtcttgaactcgtgagctcaagtgatccgcccacttcggcctcccaaagtgctgggattacaggcctgagccattgcacccagcctcatcatctttaaaatggaaataataatacttaccctggccctttcagggtggttatatgaaggtcaaattataccgtgtatgaaagtaatttgaaaactgtaaaataacatacagatagaaaacttttgattacacacttataagagtgtctgtcatataatagagattctaaacattgttcaaccactttatcagaacgtagattttaaactcaaaataggtttatagttaggtagtttctaatcattataatattatctctatgggcctaaattttattatctgaaaaaacatgagaaaattgaactgcttgacttataattccatttcagctctcaagcccctgctagagtctttgattctttactcacttattcaaatgcctctgacagaattaacactatttttgctttgctaaggagctgccactgttaagaaattactctctaaaagaaagaaaattggcaacagcatatgtgtattttcagtctcttttcctcactctattaaattttgtacaagagatgttatttttggtctagtaaatttctgtcatgttttggagtataaaattacttgtgcttttgcatctaatttgtgggtgtagaaaatcataatcttttgaaataccttatataatacatttttttgccacaggaaatacttgaagttattgttgtgtaccttacgtcattttagtccaaaattatacttgtgttctctgtgtgcatattttgatatgtattaggagattatggatctgtgtgatttcttaagtaaatcctgatattttcacaatttgatgatgactctttaaagttagacttaagttttgccaaaagcaagaagcctcaaagagtaacatttgttcatgtcttaacactatctccctcttattggtcagaatctcagtatggatgcagtgtccatatgcacaacaatatattaattcagtttaacagacttaatgctgaataagcaataagattaattgaattaactaaatcttttgatagtatccacttccatatatatagttatagatataatgctagtgaatttgaaccataaacaaattaataatacatgtgatttctgtgaaaatttatattagtcttttcaatatgtcaatatagggcagtatttctcaaatatagaggatcagtttttcaccattgtccctcttggggacatttggcgatgtctggagacatttttgattgtcatggctcgggggtgctactggtatccagtgggtagaatcaaaagatgctgctaaacatcctatcatgcacaaggcagccccaccaccaacaaagaattatccagtcaaaaatgttactagtagtatggttaggaaactatcatatagaggaagcaatcacattttacaagagccataatatttaaaatgcctttttgttcattctctgtatatttgactagagtcacaaaataacttgataagattgttgccaaaaatattagaaactagaagaaaaatgtgttgttaagtctaagagtagttaaatgaaataaagaattattcttctttggatttggatgcctgcatcaagatttagattgtaaggatacttaggactgaacatttgctctatatgaaatttgtattaatcaaggtatgaattgcagcaaccactctattaattacatatgtttggccaggtgtggtggctcacacctgtaatcccagcaatttgggatgccaaagcgggcttatcacctgaggtcatgcgttcaaactggcctggccaacatggtgaaaccccatctctactaaaaatacaaaaattagctgggcctgatggtgcacgcccgtagtcccagctactcaggaagttgaggcaaaaaaatcacttgaatctgggaggcagaggttgcagtcagccgagattgcgctgctgcactccagcctgggtgacagagtgagactgggtctcaaaaaaattaaaaattaaaaaacacacacacacatatgtttatttacatcaggcttcaagaaaaccatgaagatgaagtgaaaaaagtaaaagcggaagtagaggatttaaagtatcttctggaccagtcacaaaaggagtcacagtgtttaaaatctgaacttcaggctcaaaaagaagcaaattcaagagctccaacaactacaatgagaaatctagtagaacggctaaagagccaattagccttgaaggagaaacaacagaaagtaagtaacaacagaaaattatcaacatttaggaaaaatatgtggtagattgcttttagagaagatttgtaaatttataaaagatggtagtataaatctccgtgttgtaataaaaagtatgagctttatcttatgctgttaaacaaggtattttagacaatgctgtttttgtgggcagatatagtccaatttatctttttatgttttcgtcaatctgatttgtgaattatctatatgaagttaggaaaaatcttaatgtacattacaaaaatataatatatattacattgtattttctttttttctactggaattttatgctactgaggctatttttaacaaatgaacaattttgaacaatttgagggattgagggaagtatgataatgacaaaaagggatgaaaaaagggggtcatagagatgtttttgtgagaaggagttggtcagtgtattctgatttattagggttttttttagtttatctcagatttgatctatttaaattgttttagaagatgctggtgtttttctgtgctagctatgaaatttatgggtaaactttaagcctttcctagtccttttgttgtctacctaaattcaattaatttcatatggaaggatgtagtaagtgagtaatataaatatctaaaattggatgtttgaaaacaaaacatacctgttttttgtaatagcttgatttaatgctgagttctcaaaatcattattaagattttgaactttcacattcaatgtggaaagaattgagtgtaattacaaaagatttatttgaaaaagttgagttgttaatttgtgaaatatgttccattaaactcataatattttagaaaaatagtaggaagtaataaagcttgtttattttttatatcatatattcatataaaatgtcagttttcctttaaaaattacattttttttttggttaatttttaggcacttagtcgggcacttttagaactccgggcagaaatgacagcagctgctgaagaacgtattatttctgcaacttctcaaaaagaggcccatctcaatgttcaacaaatcgttgatcgacatactagagagctaaaggtgaacatcaacacgtgttaatgtaacaaaatttctgataattcctattggaagagaattcactatgatatatagtaattttgttgatgaatagggaatttataatgcactgttggtggctagacatagacacacacatgcatttttcaacaataagtctctttatgatactcatttactgattatcatcttggggattaggaaaggataggccattatgaactactgtttctaatgaaattaaatttaagaaatattttacttaggattttttttaagactttattatttttttagagcaattttaggttcacagcaaaattgagaggaaggtacagagatttcctgtatatctcctaccctgaaagtggtacatttgttaaaattgatgaacctatattgatacatcataatcacccaaagtccaagtttacctctattttagctcttggtattttacactctgtgtgtttagacaaatgtataatgatatgtatccatcattatagtattatacagggtattttcactgccctaaaaatcttctgtgcctctcttcttcattccttcctctgcacctcaccaaacccctggcaaccagtgatctttttactgtctccatagtttcaccttttccagaatatgttatagatggaaacatacagtgtgtccccatcattctcaccataggacagctaggaactcctttctagtggcatacatattgtctagtattgtaagttacccttttatatcttatctttgtaaactaggttagaaattacttcaagtcagagatttgttctgtactactcttatgcttcatagtgtttaaaacgttgtcatatatattgttatatacttgtttgtttaattaattcagccaaaatgaaacgtgcatatttgataaaattttgtttgtgggtgtttgttgaagatgaattgctttacactagttttttttttttttctcaaagtcgacttttttcctcaaggtagacttgacatgaatatggaaaaatatatgtagtttgtggttattttttttctcttgtgtacttaaaaattcagactgaatttttcttataatggtatattttctgttttatgttccttttatcattgatacttcttgaagagtcatgaataatacctttctttttctcttattagacacaagttgaagatttaaatgaaaatcttttaaaattgaaagaagcacttaaaacaagtaaaaacagagaaaactcactaactgataatttgaatgacttaaataatgaactgcaaaagaaacaaaaagcctataataaaatacttagagagaaagaggaaattgatcaagagaatgatgaactgaaaaggcaaattaaaagactaaccagtggattacaggtaattttatatttaactctgataatgtctgatttacaatatagaggtagtagtttatttctactttatcattttatctatggtatttgttaaaactgactttcaaatcactttgattaatgtaattaatttcttttgtgacttctattgtgtttatagttctagagtagcatattagtatgttgtattaaaatgcagaagcagctaccagattatcttatgtattaagtgtcatttagaaagtatggtcagtgatagcttcagaaagttgctattatataattgaaatatttactgtctattttgttttacatttatttgtaaaaatataaagttacattttattttttagggcaaacccctgacagataataaacaaagtctaattgaagaactccaaaggaaagttaaaaaactagagaaccaattagagggaaaggtggaggaagtagacctaaaacctatgaaagaaaaggtatgtgaagaaacatactgacttatatgcttaaggtagtgacagagtaagttaaatacatagctgattaacagttaatatactgccttaatttgatgacctggctgtattaattctgtattaattttgaggactataagcagtattgaataacgtagaaaagtctaagtttctgttctgtaggaatttagagtctacttgaggagatacctataatgtaactcttatttggaaattactacatcaatttcattcatctttctgacattagagtacctctgaagttccttcacaccttaacatattcaactgtgtatcatttctctccaaagtaatcatttacacaggttggtgcttttgacttttgggacagaaagatagacattttaagataccccactttgacccaaataggtcctttttaatccttcaggagactaggctgttatttcagatagcaaagttatttggaatatcttcagtatttgcagtaataatcagtaaccaatctgctcatagattaattctgtgggagaaattgcttaaaattttatagttcatagtaaactgttttgtaataaaaattactgattgaaataaccccaaaaaaaactaaaattggctaaaatgcgtgtaattaaatttgttatggacaataaattggagataacttgttggtaacattcaaaatatcgaaagtgaactgggaaatgttgatgttagcagtaatatttgccattgaagaaaatcagtatggaggagctatggttaggaaaatttttattataaaatttacccagaaaatatttaatgtctataaaataatttcaatcacatgaaaatggaaaagaaaattctgtctttaaaggcattgaatagaaaataggtaatggaattcaaatttcttaatagagtatgctcccaaaattattttctatgaaaattcattaatgtcagtgtaatttattgacactatttgcgtggagtcacaacatgcttgctgtcagaagctttgctggtgaaaactgtaagatcaaagtgtccttaatcttttggatttccatctttctaactccctaattggggataggcctgatcttatccctaaatggggataggttagaaactggtatgtttgttcctaactggtgtgtttctataccagtttctaacctgattcctatcagaatgttttaagagccttgtggctttgcctggactcttctatgctacagtttatttagtttatttattcagtttattcctccttaaagtgggaataatactatctgtattgccagtttctcaggattattttacataaaatgatatgatatgcggaagtcttttgtaagccatcacatccatagcagtataagatattactactaactagaaagagaaaacaggggtctatgcccagtattaaaattggcattcaggaatctagtgagaatattttttcaggttcattgcttgggcatttctaatttatactcaagaaatgctttcatattgtttggaaattttagtacccttttctctgtaaacagaatttgtagtctacctatgtaacaaaacccacccctgtgccttgcatttcattctccttagcatttattactatcttaacatactagacatgtacttgtcttttgttcatcttttttttttctttttttattagaccataaactttgatggcaggaactttgcctattttatttattattgtattcccagcacctagaacaatcgctggcacatagtagatgctcagtatttgttgaatgaatataaatttttaaatgttataataatattattctgaaatctatgcatacgaagcttttggtacagaaaacatgaaaagagaactactgccttatcatccagtcttcttccctcttctcattcagtctagaacataacctgttttggaaaaagttctcaaaccatatgtttatcttgccctcaaaccataacaacaatcaatgcaaaagacttctgtgacccccagaatatgtggggatttctccacatcagcaagcaagcagttggttttgtagcagacaccaactgggtgtcgtccaattcaattcatcatctacctggagatagtgtcagatcccacagatatcttacttcgatcaaatcacaagtccaggcctccgtgacttccgaagttcccacatccccagcccccagctttgggtttgattaatttcctggagtggctcacagaactcagggaaacatttacttacatttaccagtttataataaaggttattacaaaggatacaggttaagagatgtgtaagaagagatatgggggaaggggtgtggaccttccatgcctttctggggtgccaccttcctctagaaacctccacatgttcagttctccagaacctctctgaacccagtcctcttggtttttagggaagcttcatgacatcagtatttcttctcctagggtatggggcaggaccccctcgtattagggttttaagacccacagtcagaaaggcaggggaagattacagtcctgccttagggcaggtgaaaggaggatgggagaaggtcagagagactcttttctgaggtgtgctcggaaggcctaacacactcaatattataactaaagatgaggacaagggctatgagagttataagccaggaaccatggaaaaaagcctatatgtaataacaccacaatacccatggtaccattcacgtttgttgtttttctgtttttcaattgttctttcagtcttggttcccttaatcttaatttagcaagtaatgccaggtgggataaaattgcccaaacccaacaaagtactgtgtgctgcaggattatttaatgacataccttatgtcccccactagtatttacatttctgggagtacagaaaaattcttgtacatatttcagaaaaaatgaaattaataactatcaaccacttagtgaagtttttacttttttttttgagatggagttttattcttgtcacccaggctggagtgcaatggcgcaatctcagctcactgcaacctccgcctcctgggttcaagtgattctcctgcatcaacctcccaagtagctgggattacaggtgcctggcaccacgactggctaatttttgaatttttagtaaagatggggtttcaccatgttggccaggctagtctcaaactcctgacctcaggtgatctgcccgccttggccccccaaagtgctggattacaggtatgagccaccacacccagactgaagtttttacattttttaaagggcacttattagctgaattaaataaggtaaaaaattgactagtattagagacaagaattggagaatatagttctctagtattcgagaaagtcgttttgataggacaactaatcttagtgagaatttggctttatttcatatttttttaattttttgagatgacgtcttactatgttgccctggctggtctttgaactctgggctcaaacaatcttcctgcctcggcctcccaaagtgctgagattataagcatgagccatctccccaggaatttgactttaaaccatggttctcaaccctttcagattcaacattccctttaataaaaaatataatgtttcataatttcccctttactattataattgaaatgcatagttaacataaactctacctacttacataatttcaaaaatgtcattatgaatgtcctaaatgaaatatatagggggaacataaaaggaatattcatatttcaacatgtaaatgctttggcatgactccattggaaaatataatgaactagtcatgtgcttgcaccttcattaatgtgagttcaaagctacgattgcagactgacacaaatgtgttctattggcaactgatgggtcatgatggtattgccatttgtaatttgatttccaaaatggtaaacaaattgttggtgcagttctcagcaaaacaatgtctataatcttaccttttataagactgttgtattcctagaaaacttagtgtatagtaaaaccattaaaaaattacttagtgtgaatatgttagttggagataaattcttagctcagaccagtgtaagcagaattttttactgtattaatatccagtagaacatttgaaagttgttcagtgcatgagactattctgcattggataggctttctttggctcctttatcatagttataataaaccatgacacctacccctgaaatgccctaattcccttccgtttctttttcttttttctttttagcacttaaaactagctaacttactacaaaatagatttagatttatttcttgttttgttatctgtatcgtttgctcccttctccccaatctatctaaccaactagtataaactagatagtaagattcatgaagatacacttttttatctgattttattcatttgttctattcctattgcctctagagtagtacttggcacatggttagcactaaataagtacctgtcaaatgagtgaagtaatgtgcattgaagacttgaaggggctctgatgctaggaaattgtcatgggataatagatgaggttggtcgtttgtacagaggattcttgttagaagcttactctagtcatgattgtattagaatcttcatttaaaggctcctgaagggtgttggcattagtcagaactgtctcccagaattttatttgtcttgtgatagaataaagcatagttagcctaaagagcagttttcctaatagctcggcatgcccaaagattctaggagttatacaggttgaacatctaatccaaaaatctgaaatgctccaagatacaaaattttttgagcaccaatatgatgccacaagtggaaaattctgatgtgacctcatatgatgagtcacagtcaaaacacagtcaaaactttgtttcatgtacaaaattattaaaaaatattgtataatactacctccaagctatgtgtagaaggtgtatgtgaaacataagtgaattttgtgtttggacttgggacccatccctaagatatctcattatgtatatgcaaatattccaaaaatattttttaaaaaaatccaaattctaaaacacggctggttccaagcgtttcgtaagggatactcaacctgtatagcaaaatgaacatatttacatattctctaggaaatattagtttacaatttttctaggcaaattataattgataaatcataaagaaaatttaaaataacactggtaattttcctacctccttcgttattgttacagaatgctaaagaagaattaattaggtgggaagaaggtaaaaagtggcaagccaaaatagaaggaattcgaaacaagttaaaagagaaagagggggaagtctttactttaacaaagcagttgaatactttgaaggatctttttgccaagtgagtttaaatatcattataaaactaattatgtgtaaaatcctttagtgacctggaaattatatagctttatcatagttgataatatgagaaatggtctagtttaaatgatcatttattatctatgatttacttactttttattttctttaaaatctgttttaaatatattgtaacaattatagatggattttcctgtgatctcgttgtaaattagcttatgacaaatatagggtgttacaattattgtaatttggtttggtaatgagtatgcaattgaaaagccaaacactgaatggtatatttcatgattctatattaaattccacagagccgataaagagaaacttactttgcagaggaaactaaaaacaactggcatgactgttgatcaggttttgggaatacgagctttggagtcagaaaaagaattggaagaattaaaaaagagaaatcttgacttagaaaatgatatattgtatatgaggtaagctattatgtggaaatgtgccacccattgtaatgaaaaactggttgacccctagaaattgaaataataaatgtgtgttgtcttaagcttgggttatgttttcttttcccatgtgaattgagatattcctggttcttcatatgccacataattttggtgtatttttgatcttttgaatattatattgtgagactctggttcttgtttaaattctatgggaaaatgtagatacttttgttttagcatgcaatcggtctaattaggttcaggccacaagttccaacctcatttcttgggctgtggttccatttttcaaagccttttcaatactcttcagatctgtcctgcctgtgtacctcacaataggtgatctggtatgtgagctatgtaccattagttcagttcttagaaactttggtattctgattaggatcgatccatacatttgcagctcaagagtgagcccagaagttcataaacaactttatagggtccctttcttgagctcctccctctttgccatctctctgatactttgtttccctagggatttccatttggggctttagttacccagtgatgccatgtacttcaggaattgcacacttctgcagccaagcaagcaagaggagagtagaaagaggaagaaaaaaacgacttttaccttaccctcttagtatcatagctctaccaattggagatttccctcccaaaaaatattagcttctgtgagttcccattgcagcctctattaccactgctatgggatggcttaagggttggggcatgaaagaacagatagaagaaaaaaaaagtgaggtgttttcatattgtctcttgagtgttaaaagattccctttctctttactcgagctagaattagaaggtttacctggagctctctctgtcagtgcagacacccatcttcaggtttcaaataatgttgtcttcagggcaggcagtaacagaataaaagaaaaggtaaattcatcacctgtttgctgctactttaagtcctggtattctattgtaatctgccttctactcctttgcaaagtcctcaaatggttgctccatgcatttaggagagagaagattgaatgtatttactccattgtacctggaaccagatgcccttgccctgcatcaccccatgtcatttcttagcagagcctttgagatttttgtgtgtgtgtgctttacaatctctttccaagttatatcttctgatacagtcatggtcgtgaaaagcaaaataaaatcatgtgttaacatttaaaactttttaattttattctgacaacagctaaaactatttaatcttctgtttcgctcatttcttccaaggtaaacttcagttggttttacgtgatttgctatttcttcttctttgcatttacaaatgatctgtgatcatattactgatctttgtaaagggctaatatctacctgcaacatttggatatgacagtatttaccctttgtaaatacacattttctatttatcttcaaaaattaccattcattagtctgtgttaatgtctgtttactattgtgtcattatgaatgtgatgtgaacatacgaagttgaacttatttaaacgaacactctcatgagcttctaatccacattccttccttttccttctaagttaccatttcttaaaaatcttttagaagtttccttgatagggaaaacacaaattattgaggaatttttctttctcttgacatctgtttatagttactctcttgttccagcagtggatatttcccctccatgtttttctttgtctaaacatatgttcaaaacaaaacacttttattcttctttgcaggttttacaaggatcaacttttagttttgaaacctgctattacttttagaggccattttttttttctctaataatgtgagttcatgcgggctgaagtaattggaatactttatagaaaagattgaatttgtcttctctctgaactctagtttgaatttctaaattttatgaatcatctagatattaaagaggaggggcatatcaaagaggagaaccctagcagagataagaggcaagagtaaatgtttcatgtatgggtaagagtggatttgtatttacctaagtaaaggtagaccctggacaataaggttggatagatgtggaggtggcaaaccatggagggtcttgtaggtcaagtggatgtttttagacttgaagtgttaaattattatctgaaatcattaagagtctttttagatccttgagcttcttgagaagaccatggatattatgcagttattatataatgttttaaaatagtaagtattttagtttaactgtcttatgtaattccatataaatggatgcatgttctttaaaaatgttaatgtatttcagtaaatcaaaatatactttttgactcatcatttaaaggaggccttcagtgaatgctctgtagaggattattttataatactaattttgatatcctaatttatttgttataaagtttagaaggtttgaagaatttaaaatatagtgttaataaacacactgaacttttctttttttatcttgtatttttatatagtacaacagaaaaaagatgaaatgtgaatagtaaagagtctgtgattgttgttcatagggcccaccaagctcttcctcgagattctgttgtagaagatttacatttacaaaatagatacctccaagaaaaacttcatgctttagaaaaacagttttcaaaggatacatattctaagccttcagtaagtgtatatcttttattatttttttcttttttccatgttaaaatgcatgaaagtgaaatcaacttctttcttaatctggccaaaagcattacatctttctcattaatagtaatacagtaaattcaacttttatttttaacaggtagtgatgtgtaataatttatttaatcctttttaacataataacagtaaacttaagattcttaagcttttcataaagctcataaatgatttctagaaattttaaatatgtagttatcattatgtattttgctgtagcagcagtatacagttaaataaaataggaaaacatgttccaagactgttttcattcaaatatttatgctatatttttagcttataaaaactcattaatcattaatgtaaaattatttgttggattttttaaatatttagtgtattatttttgtttcttttttctttccatgtttcttcattcttccaccttaagcagaatcaggtgtgtgacacaactatgttttctatccttgttaccattattaataaatacaagggcatgatatttttcacaaaagaaacactttgttcagaaccaaaaaagatcatggcaacagtcagaattaaaaatggtaaaagactaggtgccaaagatgacttacataattgggtacctagaaatattctatggtattacagtaatgatgaaaaatacaaattagaacacattttagatcctattgagttaaataaatcagagtcaagaccaaacaataaataaagtcaatttacgtcaacaaatggtaagttggcagattttaactccctttttgaaaatgaaccatgatcctaaggttggtaaaattaatcaagaatgttgtcaaaatgataaagataaaaatgaggaagagaataagataggcaagagtgagaaaggaaagagacacatagctgaaaatgtgagtcacaacaactacatagatccgtagaatctgctatggaggactgtgattatgtgacagttgctgatgccgtggcttagtgagctgagggtgatgcacaggcaggcgatgtaactgatgcgtcagtccagccaagaaaggacgcgtccctggtttggctacgtggccgtcctttatttctttgttaactgaattttcttatagtaagtagcttacgtacatatatagtgcaaatgggaaagtgtgtaagatttagaaaaagcattaactattagtaaactttatcttaagctctaacttttgattagttcctacaaaaattagtgaatatgcattttctaatttagtgctttttttttttttacaattggtgttcacttaatgttatattagataaatgaatagcaaaaataaggtactttagagttgattgttttgccttacaaacttctaatccatccagctgtatttagaagtaagatctcactacagcgaattatatcagtaaaattttgttacagtgttgtgcagtgtcctaagatgtatactaagttccttcagtggctttttttgccatgttttataacagataattttgttataatgagaaaaggaaacttggatgtgttgctgtctatattgtgttaggctcaggcaggatgctgtggcttactcatttaatcactttgggaggcaggggcaggaagattgcttgaggccaagagtttgagatcagcttgggcagcatagccagaccctgtctctacaaaaaatttagacagatgtggtggaacacatttgtagtcctagctattagggaggctgtggtgggaggatcatttgagcccaggagtttgatgttacattgccctattgcactccagactgggcaacagagtgagacctgtctctaaaataataataatgataatgataaatggtgttaggctctgtgcctaagtatatttttcacataggctgggtaaagtggctcatgcctgcaatcccagcactttgggaggccaaggcagcaggagcatttgaggccaggagtcaaagaccagccttgagagaccccatctctaccagaaaaaaaaaaaaaaagaaacaattagctgggtgtgattgtgcacacctgtagtcctagctactcgggaggcagaggtgggcagatcacttgagcccaggagtttgaggttatagtgagctaagattgtgccactgcactccagactgggcaacagagcaagactgtctcaaacaaaaacaaacaaacaaaaagcactttgcagaatatcagtctaactctacagtttatggactttttatgtacgtactacttttggctagcttacattgagatacagaataaaagtttgttcatagcatttatcgtttttttctttatactgtccacctgagatattccagtcacctaagtcatggaaacatcaactaaaattaaatatctatgttaagagaaaatggctgaaagtgatttaattcataacactttttttcacatgctaataaataagagtttgagacttccactaggcattatctctaactcctatccactaagaatttgattttaagtagttgatggcttttaaccggattattcttctgtaagagtttggaagtctcgtgaagttcgttatacaagaattctgtttacaagagagcattacattagaatttgtttttcagaaatttggactatctcaacgaatacctttagttttattatttcaaaatgcaagggaaaaaatgagccataatcactaatagtaactgcatcatattttagtgagaaatgtgttaaaaatatcctcatgtgagatcttccttagatagaattaccctctactctaatatttaatatattttatatctaccaatcagtgatattaataggtgtttatcatttgctgaatcaaataggtacaacagaagacaggaagtttgggagatagaagagctcagggacaggaaatcacagatgtccatatctgaaataaccttaaaagttatcctgtctaatgccttcacttataaactgtagtggtagaatttgcctagtattaacctaatagtggtagatttgaatgtatacttgggctttcttattaagtggaaatgtattcctgtgatttacatatatcaacaaaaatgtttgtcttcttttttttgctacgacatatgtgcatgtgcacacacatctcctcaaacaaaaatcagatggacacatgcagtcattggatctaaaagatgttataaagttgtgtataataggtattttataataatatattttaagacccataatgtcggtggagtaactgactttacagcccatcaagccaatagagagagaaaggagaaaaaaatgaaagttgtgctgaataattaaaaaaaattatttcctatgatgcttataacagtcctatgaggtaggtggtattctaatttatagaaaaaatgcatagaaaaatataattaagcacagttaaaaaaaataaagtttagaatgagaagtaacaacataaataatgacccaatgtagattcaggtcaaaagaaatgaaaatataatattaatggttttcaaagagggaaccattactttagctcaaagaatgaaggagggctttccgaaggagtaaagaattatggcagttcttttgtagcctagtgtattcatttgctaaggtggctgtaacagactactacagatttggtggcttaaacaatagaaatttatggtcttagttctggagacctagaagtccaaaatcaagacatcagcagggttgatttcctctgcacaatcagagggaaagatctttcccaatcctctctccttggcttataaatgtccatgttttccctgtttctttttatcatcttccttctgtacatgtctctgtgtctaaatccccaaattttctcttttcataaggataccagtcacagtcgaatagggtttaccctgaaatctcattttaacttgaatacctctgtaaagacccagtctccaaataaagtcacattctgaggtactggaaattatgactttaatatataaatgtggagggtaaggggaacacagttcaacccataacggttagataacaatcgtgctttattttggactagtaaaaccaccatagatcagtttaaccattatgaaattatacatgaaggcattatatgtatggacattattaagtcatacttgctttgcttccattgtaattaaaacaaaccatactacctttgttctgcaagttttgtattctaacttatttatttttggctttcaccagaacactccgattttctcatattcctttgaggaaaaaaagttaccttttgacagtattttcttatccagtatgtcttttatggcttttatttattaaactttaaaaatattcctaatttcatttccctgaagatttcaggaatagagtcagatgatcattgtcagagagaacaggagcttcagaaggaaaacttgaagttgtcatctgaaaatattgaactgaaatttcagcttgaacaagcaaataaagatttgccaagattaaaggtgaatttaatgttttttattaggaaatctaatgcctaaaactccttccttagttgttatgtttacttttattagcttattaagaagtcaaaaatgcatattcctaatatatcatggtgatggtatactttatacatttgctctttagcatttatttgttgaaggcctactttatattaaacactcctccagatgctgggaaacagcagtcaaaaaattccttatactcataggacttacgttctagtggagaagactgacaataaacaagtcactaaatagtatgtcatctgatgttagtgctaaggagagaaataaagcatgattggtgtaaagagtatggggagagagaaggggtgtaactgaaaatagagtagtaagggaggtcttccttaataagatgatatatgaacagagagctaaggaggggtaaaggaagtgagtcatacagatactagaaaaataattacagacaacagaaatagcaagttcagatgtcctaaggtgggaggatgcgtggtatatttcattaaaaattatcacactgtaaaatataagaataatttgtttcttttagaaattttactttattctgatattaataatgattttttaatctttggttttccaagtcttaccctatttatgggaatcttttttttcttttggctagctaattgcttcagttttgttttctaatctagaatgttagcaatctgttaattccactggtaatgatatagttaagctatgtcttgcttctcacactttatttatttatttactcagggcactaatctgccattttttcgcactttttttccttttttttttttttggtactgcttcttattctggtttttacattgatagaaccaatgttagacgttcatttgccttttgctgtgtatatttgggtaaggatctatatgtgcaatatatgggacagttaaaatcagaattctaaatttgtattattgcatcaggcaataatgtgggaaataccttgacatttcatatacacaatattcttgtattaatttaacgtcttagttcaaaatcttccttgttaatatagagaccctattatttggtttggcaatacagttgaagagattgatggttcttatgaattgtttgccttttcttttcaatggctgtagctatgttaaattattacatgtttgcttgttatctttcagaatcaagtcagagatttgaaggaaatgtgtgaatttcttaagaaagaaaaagcagaagttcagcggaaacttggccatgttagaggggtatgtgagaatttaccatacatttgttttggtttcagcagtgataagccagaaatgaaaagtttagatatgttgtaaaagtactgatatgcctctacaagtgccctgtagtttcagtgtttattctgcatctgtaatataaaacagtaagcatttctatgtgtctcaaagtattttatcatctgttataccttacatactttcatctctctttttattgaatatgcctccataccttgaaaacatttaacttccaggaatccttttgtttatggaggtaactgctaactggtccttggtccaatgctgccattttgtaaccatttgttatgatatcttcccagcttggtataatgttttataattacattgttcctccccctctttttttgtgttcttgtaattttctccctatgttattttgtattcattttatataatgaataaatgttgcttatgaggtcaaggccaaagacttaagctcctgttgatttcatgttgctgagtgtcataaatggaagcaatcataatgcagagtcattctggtagtaatattaaatatatgatggattcagtgaaaatattatgtgttattagaaaaatattcagaacaggccgggggcagtggctcacacctgtaatcccagcaatttgggaggccgaggcgggcagatcactggaagtcaggagttcaagaccagcctggccgacatggtgaaaccccatctctactaaaaatatgaaaattagctgggcatggtggctcatgcctgtaatcctagctactcaggaggttgaggcaggagaattgcttgaacctggcaggcggaggttacagtgagccatggtcacacaactgtactccagcctgggcgacagagcgagactccatcttttaaaacaaaaaaaaaaaaggaaaaatattcagaacagtatcttgctggcagcaacatttgtttcatcaatgaaaatatgtgttaatttgaccttttctatctaagttaattatgaaagtgcatactaaaatgatgtaaaagtttatatttcaggattattcttattcatggatgattaactaaaatgcaaaaagaaattaagcatactgtttggctaaactgttaaaaattatttttattttaaatgataagcagttaaacttattaagtgatgactcatctctgctgatatatttatgcaaggttttttatttcagataactcttctatttatattaaacagaaactgtatttctaagcaatagcatttcttagagaaaattgcctctattatgttgcaattaaaatttaattactcatgagctctttaaagacacaatttctcttgtgtggttttatttcatataaagaaaaactctgatatactggagagaacattagctaaatagactatttagacttaatcattttgatcagacatcaaggctagactatttaagctgttacttattagctgcatgattttaggaatgtcaaatttcctaagtcttggttttcttgtatttaaaatggaaattataattcctatctcatagaattgttttaaggatgaattgaattaatacagttttgacttcaaatattaggaattattgagtataataagcctgttgtattgttggtacttcgtattatacttactaaaatatttgattaaagatttaacatattctttcgtagtctggtagaagtggaaagacaatcccagaactggaaaaaaccattggtttaatgaaaaaagtagttgaaaaagtccagagagaaaatgaacagttgaaaaaagcatcaggaatattgactagtgaaaaaatggctaatattgagcaggaaaatgaaaaattgaaggtaattttttttaatgtgatcatttttaggggaatattttacgttttgttactatttaggaaaatttcaaatatgctcattactatataaaatggctttaatgaatacaatacatattttataaatatagaaaaaaacttatgagaggcaaggctaagggttatagagtaggtctacctgatctttcttgttatttcaagaccaatacttttcacttttctctctgacagcatagattaattacctgtgtctctcttttttttttcttttgagatggagtactgctttgtcacccaggctggaatgcagtggtgcaatcttgactcactgcaagctctgcctcccgggttcatgccattctcctgcctcagcctcccccagtagctgggactacaggtgcccaccaccacgcctggctaacttttcgtatttttagtagagatggggtttcaccatgttaaccaggactgtctcgatctcctgacctcgtgatccgcccactgcggcctctgtgtctctttgtgaaaatacagatgcccaagctcccatccctgaaattgatttaattattttagggtgggtcctgacacagatatgtatgttgttgttattttaagtcatcaatttattctaatatgtagccaacgttgggaacttcgttctcactaatattcaaatgaagactttaattctaatcatatcaaatatggtttctaaaactactttgaagatttatgagtttataagattatcttttatttccttgttttgataatgtatactttttattttgtttgtttttttactaggctgaattagaaaaacttaaagctcatcttgggcatcagttgagcatgcactatgaatccaagaccaaaggcacagaaaaaattattgctgaaaatgaaaggcttcgtaaagaacttaaaaaagtatgacttttatgactgattataacttttgatttttattttacttaatacctcttggaaaaactggaagtagatccttgatgagagtgtctgtaaaggtagatattaagagattgaggaattgtgtttctatgcctgctgtcatcacattccaccatgaaaaacattgataataaaagttaatacatttaggctgggcacggtggctcacgcctgtaatcccagcactttgggaggccaaggcgggtggatcacgaggtcaggagatcgagaccatcctggctaacacggtgaaaccccgtctctactaaaaatacaaaaaattagccgggcgtggtggcgggcgcctgtagtcccagctactcgggaagctgaggcaggagaatcgcttgaacccgggaggcagaggttgcagtgagccgagatcgcaccactacactccagcctgggcaacagagcgagactccatctcaaacaaacaaaaaaaagaaatgatctacgttgcttacacataccttatgcttatagctaggtctcgtaagcattaggaagtcaaaacaaagaatcttttacatgtgtaaaggtataaactatcccatttttctaaaaatatagaggaacaaagtgtcaaatttaaagtaatcactagtaactaaatatattcctctgacctcattttcgtgatctgttgttctaattattattggccatattgctgctttaaaggagagatgttgaatttgttgaaattttaatcagcatttagagccccaggttatttttgttttccaatttgtaatgataattttgaatacactgaatctatgagaacagtattatgttttctcataaaatactaattagcatttaatgataggaaactgatgctgcagagaaattacggatagcaaagaataatttagagatattaaatgagaagatgacagttcaactagaagagactggtaagagattgcagtttgcagaaagcagaggtccacagcttgaaggtgctgacagtaagagctggaaatccattgtggttacaaggtaggaacagagttttaaacttgtacaaagtttaatcatttcaaattttggcattgttttaaaagacaacactattctggataacctggtttcttcctgatgaacagtttgtttggttgttgttttaacataatactttttttctgttgtagtattgttggagactttttcttccttgaaatgtttaacttgtttaaccttgtttgggtggcagggcatggaacagtgtagagctggggctgggcgaaggagttggagctgtgtgtgcgtcatgaagctgtcatcagctatgagcctgggctgaggctgctcagcttctcctgggtgctatttttctccaactgcagcttcagcttcttgattgtataatttgcttcctcaagtatgagccaggaataattgagctgtcttgtcacaatgtgtggcatactggatctaggctgtgctgcaatgcttttagagttatatcctgggcaactttctcttcagatagccccaagagatgaattcagcaccagctttgatgttttactagcttctgctttctggtacttgattttctcccaccccgaacacatgggattccaacctgtgaaactaatttttgtggctatgaaagaggtagtggtagtttatgagtaaacattcagtctgttgccactatcatcatgtgtggttcatcatgactgtgatgagtaggtaaaaggctctttgtgtcattctcatttccaattttaagcagctgcttcaaggagtctggaagtcattgaccagtgggatcctgcctgtgtcttttcccattaaagccatcctgtatgaagtggtatcctttaccatctagcacatctgccgcccccatttcaaaaggcatactcatctttatctcaacattctcatacagttccttatgtccatgcacctccaatgtcccctttgatgtctttgaggttttcatcttccatgtctgctatttggaatggtcttgatgggaggcaagatagtgatcactacaactaggatgggagtcttagtaccgtgaggctacagcaagtcccacagagggcctgctgcactgtacttgcctctgtcaaccaagtctaaggagaaagattaagcaggcatattaaaggacagcccagatggacatgaagtcctggaggaggccttggttcctgtcctaatactaaacctagagtacccagaatccacacttctccactctagctctcacttttcccatctacacactgggaaaaattattctgtcagaaagccagtgtcaaggtgagaacaaataacaaatgtgatgatatggagtgggagaaggggtctcttctactgtcttattggaccctagcagtggctctgagccagcagtcctgtcagttgatttcttggtcgttcctttgttttcttctataatcacatgtggactcagaatgaattttgagttactctgaaatctatttattcaacagatatttacttagtacctcctattgccagactctgctttatgttggatattattttttaaaagcccaccttgcctagatttcctcaaaggaccaggtggcttccctggttttgaaagaccctaattcttactatgatcttaagtaaattatatcctttctgtgggctcaagttctttctaagagggctctttggggctacaaaagaaattgttagtgcaaaaagagtttataaggtttataaatggttagtagaggtgatgatgatatttaaccataattgaagatgactttgcattttagatcatatacgtgtttttcgtctgagaacgatacaggtcactgagcataccataagccttcagtaaatcatttgcagaagacattgcagaagacataagtctaagtagaaatctcttgacagagagaaggctcgttttgatccttgacctcaaatttaggttccctaaatccattaaaaaagagaaagaaaaagaaaaaaagttactaaagtttaaatctgggaggattatatacccttctcaataaagcagtttagagagatctcttttgggacccatgacacaggtcttgctcatgctgacatctttatagttgctttattatttattcaacaaacttagtaacacgtattctatgtcaggccttttcctgactactgggacaaaccagggtgatgtgggggctgttttagatagggtgatcagaggaggcctctctgtttgggtggcttttgaatagaaaattagatgaagtgaaggagtaagcttctgatatttcactgtttacttgtggtagatctgtgataatctctgtcaggttaaaaacattcccttctaatctaagtttctaagatctatcaaaagctgtttgaatatatttagacaatcataattttcctttcttgtattatcctagcagattttgttgccaaagctatactggccattttaacttagaatgcagtctttctattcatttctctggaaaagtttggatattgtaagcattatttttctttaggtatgatgaacctgcagaactgtttggttcaattatgaattttttttttctggagtctgtatttttttgaactattaatcatttctttaatgattataaatctattcagatttttacaagctttatccctctcccatcatacactatttttcttacccatgcttttgcacaattttttcctctcccttagtgttttcctacctagatacctcctatgtgtgtctgtgtatgtgagaaaagctttttatttgccatctttatatttctaagaatatctagtaatacagaattttatattctgaagaattttactttgcattttcttattttgtgattgaaaaaaggtattaattttaaaatggtcaaatcaggctccatccttggaaaatacccaaatcctttattttgattgggccatctgttaattagggataccttatctcttgccaccactttttaatgctaaataaatatgtagctaaaactttgactagaagaaacagtaaaataagatattcttgcttatttttagtacagttatttgaactgacttttaaatcagtgacataaattatttgccatgtctatactttttttccttatacttttagaatgtatgaaaccaagttaaaagaattggaaactgatattgccaaaaaaaatcaaagcattactgaccttaaacagcttgtaaaagaagcaacagagagagaacaaaaagttaacaaatacaatgaagaccttgaacaacaggtaagtaacgtaatttttctttacatgataaaataatgcataatatcgcaagatgttccttgcattgtcttatatagataaaaatggactctattaagaagacccatctaactgaagggcaccccattcacccatttgcttaagccagaaactttggatcatcaacgacttcattcttttcattctccacattttctatcattaaatcatgtcagctctattttcaaactatatcctaaatatgaccacttcttggtatcttgagacatcactaccagtcttgtccaagctattgttttatacctgaataactgcaataatttccaagctggtatctcagcttccactcttggattatttcaccctatttctatttctgggctgtctccacacagttgccaggtaacccttttaaaacataaagcacatcacaaagcacaaagtcctatcctcagaatcttccagtggttctccatcaccctaaaataaaacttaaaagttcttttcatatcccaaaacaacatatgaggtctggcacccagttttcttcccaatctcatcttctactacttttcccttcatttcattcacaatgttttaaccacagtaaccttctttcagtactttaaacaatccaaactcgtttaagcgtcaagtccttatacttgtttcctttgtttagaatactgttcacccaaatattctcatagcttgctcccagacttcatgtctctgctgaaatagaggctccttagagagaccttccctaaccctaaccctaaccctatactacttgccatcactctttatcctcttaccctggattattttttcttgatagctcttcctaccatctggcactatattacatcatatcatattaaacacacattctttgtgcttccccactaaacaaggaccatgcaagatggaacattgccattttgttcactgctgttagcctctgtgcctaggacaatgccagttatgcagtagttactcaatacttgttgaatgaatggtgaatagaacatagaaatttgcctatgcgtgcttttgaaaaccatattttaatattacgctttgttaaaaatgtgtatctttataaatcctcatatttccatggcaaaccttatcttctaacttttcattgtcctcaaagattaagattcttaaacatgttcctgaaggtgctgagacagagcaaggccttaaacgggagcttcaagttcttaggtacatcatgtattcatatgactactttgtttttttctttaaaaaaaaaattattagtttttatatactccgaattgctacaactagagacaagcatttttcgactttactgcctaacaggcttattaggtccttatttcttccctctaatgctaatcactctttttcataatacacactagaaaaaaaggataaacccaactctaagtttccagtttgtaatttagtttaaacttttctaagagcatagaatgagttaaaccttagcttcccagaggaaaatactaatgaaagagaacaagtaatttttttactttcaggggtctctgtagcctgctttcattaagctcctcttataacgaaaccacacttgcaaatgccatcaggtcagatattaagaaaaacgtgaaggcttttgtattccaggctttttgtttgagaatggtgacattgtagcattgagagtaaatgtttacttcgataaaggctagcttgttctgattactgtacatcactagttcataagaaatgcccatatattttatgaagcaatatctgctttatttttttaacacattatcattgtgttctagattagctaatcatcagctggataaagagaaagcagaattaatccatcagatagaagctaacaaggaccaaagtggagctgaaagcaccatacctggtaatgtattttaaaaaacatgttagctacccccaagtttttgaatttgggtttgccttttttttttttttttggctcagatttctgatcattgtctccctgtaaaatcgaattcctgataagctttgggtcttttgtctctctgtgctattaatataaaaatattcccatttttctctttgtgttgtttatactatagagtagcaagtacccaagtgttcttctctttgttctccatctgggtgttacagatttaatcacaatacagtgctaagcaatgaatactaaatctgttgcttccagtttctaagtataggctctttcaagtcctctgaacatttttaaaaactgcaaataagtaaatactgcctatatttttttccgtttacaaagtaaaaagaaaatctttctgctcccttccattcccattcaaaagtgattactaatcattcctcattcctgcatatacatacacacatattttgtatacatatatatcacacatatgcatacatgtgtttgtatgttcatatgtacaatgtacatatcctcattatttgtggattctgtattttctaaatcacctcctcactaaagtgtgtatgtaatcccaaatcaacactcgcagcacatttgcaaacatccacagagccttggaaagtttgaataatccaacctacatgtccccagcagaagtccaacaaggcagtgctcagtatcctcatttcagttttcatagagaaatgagcagaggatggagacagtagagggcagcacagcatagtgcaagaagctgtggctctggggcctggtggaagggatttgaatcccaattctgaggcttgttactgctctagccttaggagagtcatgtaacacttctgaatcttgttttcttatgtaaataaatagaatttaccaggatgagttatctttaggatttaagattatcatctgtgtgagatatgtaggtgtatgtatatatatgcgtgtatgtatatatatgcgtgtatgtatatatatgcatgtctgtacatatttcccgtagcagcagtggtttgatattcactaattgggctaactttatagaccaaaactactatggatagagaatactttgtttgcatttacgtatatatattttcttggcaagtaacataaaattgaactaatactatacacatttctagcatatttgcctttaacagtttatcatggacatcttttgaggtctgttcataaattatctcatccatttaataattccatagtgtattattgcatgtataagcacatcgaaccatttatgttttgatggatatttagtttgcttccaagtttctgcttctataaaatatgattaatctattgacctaattatgccattgtgataggatgatagagatgccattctctccaaaggattataccaatttatatctgaactatctttgactatctcttgtagctttttcagtatgctatgtagtcctattactaatttgtaataaaagccatcatgtgtgagttgtactagacactatgctaattgccttacaagcattctatatttacaaccatatatgataggtattactgtctccattttatgtgataaacaaattcaaagtggttaagtaaccattccctaagccagctaggaaatagaggcaggattaaaatctaaatgtatgaaactccacagctccttggcattcctagtccttaacccgctatgctatgctacgtcttggtaactaaaagtacatattaaatactctcaaaatatgtctcatagcagccagcttggtatgtacactagacacagtattaatgctgttgatgtgaggaaaattttataattttccttccatccatatactaaccaggcccaacagtgcttagcttctgagatcagagatcaggtgcatgtgcattaagggtcatatggccatagatagttctctaatctttccattcctcagtttcttaagggaatttctgaaccctcaaaattccttatttcctaagtagacagattacctgtcatttttcaaagattaaggcttaagatcaaaccagaactgttttggaaattctaaatcactgtctatataaatggcaagataacttttaagatatttataccaagcccagtacagtagcacaccacacctgtaatcccagcactttgggaggctgaagtgggtggatcacatgaggtcaggagttcgagaccactctggccaacatggtgaaaccctgtctctactaaaaatataaaaattagccaggcatggtggcacttgcctgttatcccagctacaagggaggctaaggcaggagaatcgctttaacctgggaggcagtggttgttgcagtgagccaagattgcaccactgcactctagcctgggcgacagagtgagactgtctcaaaaaaaaaaaaaaaaaaaaagatacttgtcccagccatgaaaatgtttgctgccccttactttcgcaaacttttagtattttattatttttcaatggctgtaaaatatgacttattaaatgtagtataatataaagaaaagagatatctagcaaagatagcattaaagcaaaaatcctatttgcctgctgataaagttagaggtgttaacttggagggtgaatccaataaattagaacttttgtgctatatttggagacttttgttttcctaccaaagtatcagggctatgtcttacttatctttgtattacacagcctgcatgacacgttttgcacatagtaattgcacagtaaatgtgtaataacctacatggaatagccagtgttgtgttggatagcgggagcatttggctagcttatggttatagtcccttacccaacagtctgcttttcttctgttgtacttttagtacctaacaagtttccctggctttaggattttttccatgtaaaatttctatcatgtgaagaaaaaataacttggcctacacttctaatacctagcacatacctctttctgcctgctatgaaattataatacttgatggagggaggcagcattaagtgtttacatcctgaagtatttcagccataacatccagtgttttccaggttctaggtttcataaaatgtatctctgttctctagaacaaatccattaccttgaactcattcgtagtgggaaaaagctgagtctaatttgtatgactttttcaacagatgctgatcaactaaaggaaaaaataaaagatctagagacacagctcaaaatgtcagatctagaaaagcagcatttgaaggtaatatttaattatattttagtatcgttttgtgaaaacagctgttgaaaactattttcattaccatctttaactacgtatcctaaaaaattcagtaataacatcttatatttgacctttatattgcaaagttaattatgttcatctgactattcctaacatattagagttaacaaaaaattcagactcaacataggattaagtagtaaatttattttttaattgtaacaaatatatgccattagtatgttcttaagttttgggtcacattggcaacagtgtctttattttttttttgaaattcttttcaggaatcctaaggttatagttcccttaaaaaaatatttgctgttttacctcttttaagactgtaaacaggacaaaaaggcatggatatgagaattagctagtgatcactggctattctaaatagtcactaaggcttgaattgtctcttcaccagatgcctgtcagaagtcccaaaggtttccctgatcatattaataactttataaaaaattgatcattattcattaaatattagatattagtaaggaaaatataaatgaagtctaaaccaaaactcttaaccagactaacttcaatgttatgaatcacaaaatctttttgattgattgctctattgacaagctcttatatgcttttagagaaagattaagtcccattataagagatgataaattttagtcaaagactagaacacaacttacagaatacataactggacttgacagttaacaacttagttatttacactgtacaatggaacaaagaaaaatcttaattcttctgcctttattgctgtatttgaccattcaggaatactttggctttcatatttacaattaaatctccttgttcaaacgtaaaatatgtatatttcctatatgcaacttttaaagataatgtttccattaggaggaaataaagaagctgaaaaaagaactggaaaattttgatccttcattttttgaagaaattgaagatcttaagtataattacaaggaagaagtgaagaagaatattctcttagaagagaaggtaaaaaaactttcagaacaattgggagttgaattaactagccctgttgctgcttctgaagagtttgaagatgaagaagaaagtcctgttaatttccccatttactaaaggtcacctataaactttgtttcatttaactatttattaactttataagttaaatatacttggaaataagcagttctccgaactgtagtatttccttctcactaccttgtacctttatacttagattggaattcttaataaataaaattatatgaaattttcaacttattataaaagtatatacttgaagacttgttacagccatcaaataggcagtgagctctggtgaatttctctacattcataatgctttaagttttttaaagaatatgagggtaaattcagcaattttaagatttaaaattggagtttatatatacttatttatacatgtgttaagattctcaaatcctatgatatatacacagatgtagacatacacacatataggttatgaggttgagccgtatgttttgttaaatatctagcaaaattaaattgagcttaaactatttaattttgaaaattagtgacattaaattgttgtctttaaattaccactcagttatagtgaagagaatccagcctttgtccaagcttaggagcttactattacttatgtttttatggctagagattaaaattaatttgctggtttttaataaaattttgaataggtacttgaaactggaaaattcatttcttcacaaatggtagaaaacatattgatgtttcataatgaacagaaaccttgagatatttttaaatatggtagaatattcaagattagaatataatgataaactaattttatttgcattttatacatcaaatattatatctttgagtctaacaaatttctgattatctatttttaaaaaatgattaaacaaacacttaatatcaaaggcagagtcacatttgttcaggttcatgttgataataactggtcttgaattcatgtaagtatctggaattggccagcataagccaagatgatggcgatggacctggaaagagaaaaaaggtattagctttagcatacagatactatcttcattcacttagaaatatttgagtgcccactgtctgccaggtactgggtaagactccactttatcttactgtttttttttttatagctggtcttctcctgacatattacatatttgtttattgtctatcttccccattagaatgtgagcttcatgaaggcagacaccttgttttgttgactgtgtatgtccagcacctggaaacatgccaggaacattatcaggggctccataaaatgttatgaatcatagagcctgttgctgagtacagactagctacctgaaaaatgtgggcaaggaggcattctaattgaaaggaatgttatatgatagaatggagttttttgctctaattgcaatcatgtaaatatggttacagcaaacacagtgtgagtgtgtttgcgggggcagaggtggagagcagttctgggaaattaagtaggggccagatcatgaatgtttaatgtaactgaacagatttatgcaggaaagtaatatgctcattcatttgtgaagaatggagaggacagggctaaaactgaaagatactatttttggagggtgatatgatagttaaagcatgaatcttggcttaaattaaaattaacagttgggaagaagtacatagattagaactgttaggaattgataactggatgtatgaagtaatgaaaagaggggttaaaattaatatccaagtttttacttcagtgaattatgtggactcagagagttacaactaggcccagttttgaatattatgaatttcaggtacctgtgagaaatcaaacagacaagtccaggagacagaaagggaacaaagtataagataattcattctgtatatatcaactgctaccttggcactctttttactcaacagattctacactcaagtctgggagatgctgagttaagttagtacaagatgtctctgagagcactactgtgcaacatgaatttccacgcaggggatatatagttatcactttaattctgaagcacacctgttatgatcgatgccccacacaatacacactgggaagcactgttttacctcttaaaaaatggtggtacatgggatgagaaaattaaatttctttactgcaaataagaattgctgccatttgtagagagaattttagtgtcacttctactctattgtaggaatataag

SEQ ID NO: 745 - DNA, 61593 bp, Homo sapiens
tatttctacacctcatgccttgctcatgatagacactccataggtggtagtccactcactcaacaaatatgtatgagttttgaatggaaaaatgagtgaatagatctgaagttgggaatggaagaaaaggaaaccagggtgctttgttattataatcaaggcagcaaggaacacaactggcgataattcaagaagcccacatgggaagggcaggagttcgtactacttagctatgtccttccaaaagccaaacaattccacacaccatgacatatgatgttgtcataattgtgtatagagaagtcttatctagtagcacatgctaagcaaagaagccaagccggaagatggtcttccagtcttagaacagtagtaggcaactaacaaataattgttgtattatttttatttaatatgtgagaattggtttttttaaaaaaaaatcagtggatttactgtccaacaaaagagctgaatcaacaattgtagatactggaattacctcagtaaatttaaaattattttccctcacctccttttcagagaactttatttcttattgtctcttgagaatggagggcaaaatgtgtcccaaagctataagatacctcgtgaaagtatcataagcacatcatggcactatcatgtgatactgtttttatgagaaaagagtcatagaataggtagaaatccacctattgggtacacccctttaaaccaaacacataaagaaaatatgcatctacaaagattcataaggtagtgaacagtcacttggcaaaagcactcactctggtcaccaaaaacaaatcccttttcagaaacacatcagtcacataaagcagagtccgcctgtactcacgctgctcagagagtgatgcgtctggtcacttggtgccaatctgggccacacgtgaaaagacactctttctccccagcctatttaaaagtcagtagataattttggaagtataactatttttccaggttgccttttaagggactttctagtccatcaaaaatggattaatgtgactcattaacacagctccaaatgcagtcagagagcaaaaaacacctttccagtgtcttagtcacttctatttcctaaagctgactctttgcttcttcattttggcaagaattttgttgttttctggctaatttaaaaacatttaaaagacagctcccttactaccaggcatatggtaggaacttgatacataaatgttaaatgaagtttctttcactgtatgtaccatgtcttactcacagatttgccaagtacaataatctaagaacattgaataactagaatgtgagtacttgaattcttttttcttctcccccaaaatacctaatataggactctgtaaacactactcacacatgcacatctgaatatgtgagaacctgcacatgcacacacagacatgcagtcttattagctgttgagttagcttagagcatccttgactaattaactttgggggttatctgttatagatctgactgttctattgtacctggagaataccaatatttttataggaacccaagggtaggaaaataccatccatgctgattctgatggttgcttagcatgttagctttattttattttttaatttatttttatttgtagagatgggggtctcactatgttgcccaggctactcttagactcctggcctcaagagatcctcctgccttggcgtcccagagtgctgggattataggcataagccacaatacctggcctgtgtgtttggttttatatagttgttatagttgaaaaattgattggtctgtggttgctgagttctataaatagatttctatctaaaactatcaataagttattccaataccatactgctgttaactgaaaacatccccactgttcagatggtttggggttttttttagttgtaatttgccctcagcctgatctgttctaatattgcctattttctttcagttgaaagctatgggcagacttaaattttaataatacacaaggcagtgggaaatgaaggtccaagagtcaagtggaatctattagactctgccacttatgagatggaagacccttggcctgttactcagcctctcaaactttacttttctcaggtataaaatgaaggtaataatggtacacacctctcggagtcgttgtcgggattgtgttagagaatggatgtaaaaaatctggcttacagtagttctagaaagcattagttgcagtcgttcttctttcctgggatcaataatccgaacacccacacagtgcctgtagggagttgctccttaatgtcaacttaacatttgccacataacccaaaacatgaccctccacagcctgtgaggccctgtgtgatctagtcctgcctcccttgccagcctctcgcccgctgcctgcctcccttcacttgatgcttttgagcaaattggcctcatcactcttcccccaactcaccgtgcagcttccacctgagagccttctcagagactcttgccccatctagatagtagaacactctccaccctgcccttcacctgtgtgatctcttttcaaccttcatgtatcacttatatagcaggacttttcctaacacccctctccaagattatgtctcttcttacgctctcacagtagccagtactctttctttctgatcttgctctgtcacccaggctagagtgcactggcgccattatagcttactgtaaccttgaactgctaggctcatgcaatcctcctttctcaaccacccgagtaactgggactgcaggtacatgccatcatactcagctatttttttttttttagtagagacaaggtcttgctatgctgcccaggcttgtcttgaactcctggcctcaagtcagtatgctttctttataatagttatcatattcttgcagttgctcttataatatatatatatatataatctgcaattatatattgtacgtaactgttataggctgaataatgtccctccaaaattcatatgtgaagccctagccattagtacctcagtgaatttatttgaagatagggtctttaaagaagtagttaaatttaagtaaaaaaggagcccatcagggtggactctaattcaatctgactgtgtcctttaagaagaggagatgaggacacacagagagagacatcagggatgtgcatgcacagagaaaggccatgtgaggatactgcaagaaggcggccatctgcaagccaaggagaggggggtctcaggagaaatcaaacctcctgacacattgatcttgaacttctggcccacagaactgtgaaaaaataaatttgtgttgtttaagccacccagtccgtcgtattttgttatgggaaccctcaccgactaatacattatgtaaggcctgtcttcctccattagactgtgaactccataagcagagggactatgttcatatttcaccaccaaactcttagcacatagtttaatgtctggctccaagcaggagccaatatatttttgtttaattcttgaattcatgaataaagaaataaatgatgcaggggcatgtctattttatgctgaaagctctgtgtgttctgggttcttcagtgttcttctactatgaaactgacggaagacatattgagtatttatttggggaaggcaagaacatcctacaaagcaagtgtcaaattctgcataattgaaagggttctgaaatgcacgactccagtgtggaatatgggcagcttaggagcaagagccccacagctgttgttgtggtctgctacccttccatgggatgcagtgcccacaatagcaaggtgcagttgcacatcggtgctatgctgtaagggccccactgctcccctccagtatcttaggataatgcctcagaactgggaatcccagtgtgatgctgggtcccaggaatgtgctatggcctcaaaggactgcctgagtgagttccaggttcagacttcccattttaccaacaccaagtgtctcaagctagtctttaggccccctgggaagccagatgctatccaggtattcataagaattatcctgattgatgcaagttgaccctctagggaaatctaaaggtccccaggatgtacttggagttgcaggacatctgggagcccacacatgtctttaggtgtatggagactatgcggtcacctgatttgaaggacaagaaggtccttatcccttcccaacagcacctctctccattattaggtggctaaatgcctaaaattccatcactaacatgtcactcttttaggtcagcatcactatatctggttgcctcttttgtaaaacgaacccctaccccaccaattgctcagtacattcagtcattagcatattatgaattagttcaccaactattttctccagatgggcttgacctggcttgagtcacaagaggggaaagaggacaaagacatctataggggaaacaagacaaaggacacaggacacaggaacagaggacgaagacatctataggggaaacagatcttgaatataaatcctgccaacttcagtttttctagggctcaggcagtatgaccacaggccatccatgtgcctagaccatgctcatccatgagcccatccacgtgcctagactcatgaatcatgcagtgggattccagtacccatggcactgaggaagggtactgccacaaagttgtggcagttctccagctgtagaaggtaggcaataaaaaagcatttcctttatgctggtcctttgtttccttttccccatgggccttataaatagttaatctacctaagctggaaggagaagctttctgcctccagtaaagtttgattcctggaggcagattttttttttaaatccagcaagtgtcagataattggaagggtggagtaacgctgtaaaccatgacacacctttgtcaggacatgtttggaagcaaagagttgaaagaaacaaggtggagagaaagaaaagtgaacatttttgaaagatcactcagctttaacacaccttggctgggtctggataaaaaaaaagtgagcactgcaaatttctagaagaaaacatcaggagaagaaagagagagggggatttattcaaagttgtttccaattccttcaaaacctcaaaccaggtaagtaaacaggaagactgacctttctccttttctctgagactttgatttaaggtttgccatttagaaattaaatgtttattggagaaaagaagatgaagttctgtagtttctagcattctggttaaagtgatcaattggttataaaagatgactttggtgtatgcattctgcttagggtaggtctttcaaaggaaataagtggggaaaaggagaaggctgaaggctggttaaaatatagcgggctttagaggcaagacctttctgcattgttttcagcattgtaaaatgacttgtgttgttttatttagaatatgatacgggcttataattccttctctcccaatctcagtttcctctctcgctatcttgctctcctcttccctctgtctctctctccactggacgaagagaacaactcaggggtgaagttaaagtataggtaagggggccttctagaaacagtccctgtgctgactgggcctctctgattaagccatacatggtaaacattgctgtttaccatgctgtaaaattacctctaatctaaagaaaagtaggatctttgaaatgatctgattaattcagaaattttgcaggatcaaacttagaggaataaaaaaaggaagaaaattgtttcccgtatatatactcttacgagtcaacttgggtttcctcctgccaaaaaaattcactttgagatgagaattaccagtttagatacctaagtggatgacgttaactggtaactgacaaattatcactttactttttgaagtggaggcaaaacctctggcacattccttcttttgagaagtagttaatcagtagtctaatagtggacttgtaaaacgtagcaagatttttaaaaggtatttatttgaaaagcagaatagtttcttcttacctccatatgttctctcttagagctaaggcacagatctgtcagaactaacctaagacagatgtctatccccacacagactcactccagagattcagaggtgtcctgctttactcttaggccctgcaaaacacccacatgagtctgatcagagtttacacaggaacaattaaagtgaacagctctgcttcaagcttgcatagaaacttaccagcctgggtaacatggcaaaaccctgactctacaaaaaatacaaaattagccaagcatagtggtgtgcgtagtggtgcacactcatattatactaaccccatctctactaaaaatacaaaaatacaaaaattagctgggtgtggcggtgcatgcctgtaaccccagctacttgtgaggctgaggcaggagaattgcttgaacccaggaggcagaggttgcagtgggccaaggttgtgccactgcactcccacctgggcaacacagcaagactccgtctcaaaaaaaaaaaaaaataggaaaaaaactccttagattggtgaaactgacctgacctaagaactaaccaccttctcagattatgaaaaacaaaaagaagtctgtgtttacattgtttgtttcatttgccattattaacagtggcaggacacaactgtaaacaaaccagcataatcacaaagctggtgccctatcccacctgctcccagtcatgaaaatccaggataccaaatgtagcaagcagcaaacccatctctggggtgttacagagacaaagcctccaagatattcaattccagggcattggctttcctggcatcaaactgctgggcccttctgtgttatcaggtcaatagccagtggatggttttctaatactttggcaattttgttgttgttttgttttaaaatttaaagtgtatagagaatggagtaatagaagctataaaaatacttgcaattcattagcagagtataggaacatttgttcctaaaacaaaaaataaagagaaaaatacttagcttcttcattctctttgttgtatcaagaacaaagtgtttcatgtgtcattagaataagataatgtgatggtttaaacccaaatgtgatggtaaacagttaacgtgatggttcactgtcactaacagtggtttgtccttgtgtgtgtgtgtatgttagacagcatcggctgaatagttttaggtagacgtgacatcatttaaataaaggggaaaggaaaaaactcataaaagtagaaaaatgatttaaaattgtgtcttcttgcctagaaaagtgacatgggatcatttttacaccttcacaaaaacattagctataaaatagccacaaagcaaccctttagaactatggatggaaattagtataattttggaattgagagcttgaatgatctgctcatccttagttctagtgaagtggcccaaatatctgagaagttaaaaattatgttatttgacagtgcttccattaagtaggacttttggaagacgaacacactggtgaatcctgctaggataggcaggctcaggcatgtacctgggcaggaaacgttccttttcctaacgttacacttttaaaaactatcagcacttaaaatgtgtaaaaaagaagtcctgggaatatactgtaggtcccatgggaagatcctagtccaggcttgtgccccacgccatcactctccatttaatataactcacttatagaaagtttcctcttatatttcgtttaaaggaatcagtctcccaacacgtacctggcacctcagattggctgtggaacacacagacattggggtggcttcagattgagagagaggcatctacctgtacctgcctagagcaggttatatccacaaagtaccttccaatgaggagctcccaggccctgaaggagggcatctgatttctaagtaggtcatcacttcgtgccctctggaagttggggaatccttagcattttactgcagaagtcaaggctttgtcattgggattcagggaaaagatggagggcctagaaatgcctgctatgttttggataaagaaagaacaagcaaaactttccaggtttgctgcctggagactgtattcttagcaaacagagtcatgatccatctgcctaaatggctgcaagtcgaacccttccggccaatcccaaatgtatagctgtcagcagcaactttcactgaaagatcaaagtaagcaataacttgtaggaagtaaaagtttccgtggattgttataaacagttcatttcaggataatatttcatatcagttcaggtaccatcctagaaagctagtcacctccccactgactgccaggcgcatttaaaggtttaatctccccaaatgcctcctgatccacagcttattacctatttttttaaaagaaagtcagagaaggctttcagaggtatcaaactgatgcttaaacaaaggattgcaaaggtgtccagttgcacgtaggtttgcatgacataagtcatataggttatagctggaatgcagacagattcactggtcagatttgtccttgtaatgaggctagactcctttgttaaactgtgtatgaagcccctcctctgggctccaggaaacatacctataaagacattctttggcttctcagatccagctaggattttttccattgtgcctcattccttgcctcgagctgtgtttgaaaaacaccaacgagcaagaagttggcacatttactagggcctgaagctaagtgtacgaatcttggttactccaccagatcgttgatcagctggtctcatttggtcttggtttccatcagggaagtcacccagagccacagtatgactttcacggtccctagacacttttgcctttgtaggccccttcctccatcaaaaaactttttaaaattctattttacaactgcactggtataaagaaggacataatcctgattagattctgattatttttccttctgatgttaaaagtaaacattttgtgagccccaaaatgtgctgtgggcctaggcactgtgcccactttgcctactgggtaagtcgagcctgaaggcactaggcagagactggaaggagagctcttcaagcaaggggcacctggcaaaagcagtgtgcctcagcattctagaacccagttccaactacaaccaaaaaataaactagaaggaagagaaagttagaggaagggagagaaccacagggtaagtcagatttcaggtcctttcagaacctggggccaggcagcacagcaagaagagaagagcccagttgggacgggacccttgctgtgcattcctgtgtgtttaagacttgagctttcatccccaccaccgtttggcaacagccctgcctcataccatccatgctgagggacacagtggacaagattgcactggttttctttttcagaagcagagtaagaatgaagggagaatataaaaaatacaaatatgtattttcctacatgcttctatagattttacaggctttcttgaactgtttttcatacttatgtctgcagataagcacatgagagccgattatagtgaatgtttcatactttgagaagagtaaagttccatacaagtacgacaaatataattatttttatcctgatttaaatccatcaagtgccattcttacctccagactcttaaataatgaagcatgaatgtctcatatgcatagagttccataaagaacattgaacattatgggagacattaaaatgaattagttgatagcactaagtaccttgacagatccccttcagctatttattaccatggaaaagaatggaggttttatagtcaaacaaaggtcaggacacctgatctgctatgtaagcctcttgatgctcagcagggggcaggctgatcaactagacactgaaaaacaagatcccagcacaaagaaatagaatccaaagtggaacaattaaattaacctctattatacctgttacaagaaatgggaatgactcataaaaaatattcacgtgaaagaattatggtttaaattcttgaaatcatgtttttggttatcagcttcaacagtggggacctataattactaaaaacaatgataagtatgactatcatggtttctgatttttcctgcaggtggctatggtatggatgtaaccaagaaaaacaaacgagatggaactgaagtcactgagagaagtaagagcatcagaattttttaatttatgtgttttattatgaaagtaataaaaatttggaaacagaataagtaattcattaataattctaccacaaccactgtatcatgtttaagtgtgttcctaaatggactttaatccttctcataagacagctcttgttgatttttatgtcaaaagatatcctgctttttcttgaatgatgaaggttgtcatttccatgtacagtatttataaccctcatttttaatgatgggataggattctgctaaatgaattcaccatagtttattttatcatttccaaatttaggggtacagggcaacagaaatctaaacgaataacatcctagttattgtatcatagttgacctctacgctgaaaattgaaaacaaataaatttattttgtggaactgcccaaataataaattcagaaacatttaaactctcctcctaccaactctaagtcaggaaactctttcacttattctgtgactttcatatatctccaataaaaaaaaaattctggctccatagacttgaaagttttagttaggaaataattcacttttatgtgtcaaagaatcccaaaggtctatacaatgagaggttctatacaatgaaagctgaaggactattattcaaatcaagctgccactgcactctacaaaaacatttcctttttttttttttttgagacggagtcttgctctgttgcccaggctggagtgcagtggcgtaatcttggctcactgcaacctccacctcccaggttcaagccattctcctgtctcagcctcccgagcagctgggattacaggtgcccaccaccacacccagctaattttttgtgtttttagtagagacggggtttcactatgttggccaggctggtctcaaactcctgacctcgtgatctgcccgcctcggcctcccaaagtgttgggattacaggcgtgagccactgcgcccagccaacatttccttttatgcattaagtactgtttctggcatgtccataaccgcatcttcttgctaggacaaccaaactaattagcaaaatgcagtatgaagaaggacagtgtgaatgagagtcatgtgggatggagcaggtgtcagcggcacagctgaaagtagcacaaaatgatcctgcaccatcttcctttactcttttctcctttcaccaccttccccacacgtatgtgcccatgcatgccacacacacacacacatacatgcacacatacacacatgcatgcatgcatacaagcacactggaaacctgatatcaaagaacaaaagccccagataggtagggtcttctgtatacccaccagagacggaggtagtgctgagggccacagtcagagcatgagtgatggattcaccatctctcagacctacaggaactaaatttcagaggccaagggactggttcttcaagtctgtctgtgatgtgcctggatcactgattttgccaaaccccaaatgtgacttaccaggagcacccttccttcccacaactccccacattcaggggttgccctgaagacattagaacgaaacataatgttcttaaacacctccaaattcatgaagaagtacacagtgaagtcagctagggtgttggtctcagctgaactgagagaccatggggaaggagaaatgcagagaaacggagtgacttgagacaagagggcctggtcctccttcaacctcagaccaggcctggactggatctaattgtccaaggagagacatcaacagcaaaacaactcatgtttcaaacgcagtgcataacttcttttggctccaaagagatataaacttattttccaagcatatgaaacccattgttgttgctcatatctttttgcacagtgggtcagatcacacaccttaaagcacaaggatagaaaaatcaatgtcgaacctaatttaatatgcttagcctgtgacagagcttagaccttgccaagatccagaggtgtcagtgcattacataagaactcatcttttctttgtctttttctagttgtcactgaaacagtaaccacaagacttacatccttaccaccaagtaagtaactacctcaatagctttcttttcagtaggtcacatttgaagggccccacacctgtaaccttttccatgggagctccaaaatttttgacatcttttttaacagctatattgacattaatttctatacaacagaattcgccagtttgaagtgtataattcagtgattgctagtatatttaccaagttatgcagccatggttacagtccaattttagaagatttccatggctccacaaaaagaagtgaccattagcagtcattcctcattctccctcctctctcctcagcccctggaaaccacaaatctactgtctctgtagatttgcctattccagatgctaaaatattggatatctgatctaacctgaacaaggattgggggctaccagtcaagcttctggttgaggctacttttttttccaggagctcctatcactcctgtaatattgatctgagcccaaaagctaccccctgcccccgcctccagggagcctagttccctggggatggggagagcccacccaccagcaggtgaagtcggagcagtgatgggctgccaggtggaacaccagcaacacagagctgccacacgcccctccagcacttctagtggctgccatgcctgggcactgaccaggcactcagaaaaagcaagcccaaccaggtcctggactcaaggagctttcatcgctcagccttttctactatttaaaatttcctaatatgcaacttgctatattccacccaggagacttttcttttaaatcaggtggaatactcactctagatatttgtataaaacaaaacaaaacaaaacaaaacaaaacaaaacaaaaaaccaacgaaactggagcatggcagcttgcatcttataatgtaggtgggaaaggaaccccaaactaagaaggtcctggtgaaaaaccagggaagccttccacagggtgggggaccaggggatcctctggcctgactccaccctgaaattatcacctgcttttgttcctggcagaaggcgggaccagcaatggctatgctaaaacagcctctcttggtggagggagccggctggagaaacaaagcctgactcatggcagcagcggctacataaactcaagtgagtgcccactagtgcaagaggtcagggaagaatgggtgacaaagagagagacaccaagaaagtcctacacaggacacagggcagacacaattttgaatcagtgcacaaaagggacaattacaatcacctgtcatccattccaaatccccctgagagttatctaaataacacacagctattgggcagcagggctggagaccgggggtgcaaattataaatcatcagcatttgaagcctacttaaaatcagatccattttcattaagtccacaatataaataactatcattaattaagacttcatgggtaggtagctatttcctcactaaatcactccctttaagccatctctttagagaacaatgtgcacgcctgagggtttacaatttgaattaacaacgaaagaaacttaacgattgggttactgtgctaagggaagctggtgacatgtgatcccatgctgtgcaagattccactgggcaagcatccaacacaggcccattgttcccagtgaagcactctttcaaactaaaacaaaacaaagcaaagcaaggcaaaaacaaaacaaaaacaagaagcacccagatagcccctgaagccatttaaaatacttggaagtaagactaaaaaggaagccccaagacattagaacagccaggttgaccaaaagaaacacctgcccttacctgttgaggcacacttccacgctggattatattctagtccatccaagcagtgtctacaagaaaaatcctgccaaatcctttccatttccatgcatggtaaccatgcacaggaaggacgttcccaggcaataattccacctttccatttgtgaacagctgggggaatgctgaggtggcccctttcagctgtgccctcccgaagaccctccctgagtgtacttggttaatatagctgggtcacagtagccatttggttcacctctctgctgaagcactgagaacttatgctttttccctcttgcagctggaagcacacgaggccatgcctccacctctagttacaggagggctcactcacctgcctccactctgcccaactccccaggctcaacctttgaaaggaaaactcacgttacccgccatgcgtatgaaggtatcagtcccactaaccatacaagagaaccattctcttccccaagcaacttcactcattctttgaagatttacatgctggccacctgtgtctgcccttcacctttctccccactcctccttcatttcttttatggacttccattacttgaagacttcattcattcattcactacctcatttatttattcattcacccatttagttacttttccaactagtattttatccagtacctgctatgcgtttaacactgtgtagaatgccttgacgaatgcttaaatgaatcagacatagatcttgtcttcaggacctgtagtctaatagacaagttaagatgacagataaaatacaattgtataaagtagatggagattatcactttaagctgaggaaatcggggaaaattctatggaggaggggacatctgagcgaggtcctcatgacgagtaagagtttgatacccaaagatggagagatgggactgtccaagctgtgggagcagcagcataagcaaagacagccaggagagcccagggcttaagtcggaaattcagtggtacttacgtgcaaaaggtttgagggactcagattcagtgctaggataagatgtttagactttattccatatgcaatgggaagccacagagagtttttagcaaaacaatcatattttaggtccaggactggaactctggaagccatgtgttggaaaaattggtgagaaagagactaaacacagtgacaagttaaaaagaaatcctcggtcatccagagaagggacattttggctgggaccaggttggtaatgatggaggtcaggagctagaagtgaaagttatcactgaggtggaattgacaggtttggcaattgattaaatgtaaggagaaggcttcacacacaggttgggttcttggtggtgccaacaactgaaacagggaattagatggatgactccacttgatgaatccagctaattcatcctgaagcacagccacttgcccagctctctggcgagggtagcaagcaggcagtgggtgatgcaggatttgagttcagggaagaagtcagggcccagatacccaggtggaagccattcgcaaagaggtgttagaggaagtcagaagactaaaggagtttgccaagaaagagagtataaaagttgaaggaagcaaaggaaggtaaagcggagggaataaggagaaagaaaagccagagaacagagagaggaggaagagtcttttagggacaaggggagaccaggaacatacagcaatgctgaggtcaacacaagagagtgctcagggtcaagaaggagtcgtagaagaagacacctgagttccattactaaggttcctggagttcctggtgatctgcagaagcagttttatgtgggaaactgaccagccaggtggccaaggagtttaacagtgagaagagattggtgctggtgttggagaagcaggagtaaggcccagacactctagtgaatgatcacagcgggctagcatcccacacgcacagcagactccctcctgccgctgcaggacaagagctgctgggctgttgggaagccccaaatccaggtgaggtggattgcatcatcacagtgctttctgaggtcgggcctgaccagggatttgtaccttcattttaactgggtccacgtttgggacaagcctcataaggtcagagaggttcctggtgctgagggcaggttacttgatcagggcaggtcacttgctctaggacagacacaggacaagccggtggaggaactgaacaaaaaagaaagaaaccaaaacctcctgctctcctttgttcatccctgcctcatctgaagtaggtccttgaccagagcaaagtgctgcgaccagggccatgatgggtcgtgttttacatcatgagcctggctcctttgacatgcatgctgaagagcatacctcattcccccctgaaacactgagggctgtggaggtccagaaataagtaacaggcactacctcccgttttggaagctttatgggcctaagaggccatttgttctaagtgtttcatcccctctccagggagctccagtggcaactcttctccggagtaccctcggaaggaatttggtatgtcctctccttattttctaaagaaatggtcaaacgaggcactaggaaaatccctgggggagatgaagtggtgggagtaggggacctcatgagttaaatggattcttctaaaagagtttgacccctgctgacctatttttcccttgctttttatcctgaagcatattaaggggactatcagccacattaacttgctgtcataagcctttgctcgtggcactatagaaatggtaagctatatataaggctcaggcttggatggataagcccctaaggccaagcaataattgtagggattcttctttccatgagatgcacagaggcctcccaaagaagcagagcagcgagtagaacacacaaatgccaggcatcccggcacctccactattgcttgctttcaagggaactgcgtgtgcttcatgaacccccaagctgtgtcttcacttggccttaagtttttgttccatgttcttggaatctcactgtgcatatgaattgatgccaggatcattggttatacagtgattataattttctgtatttgcttacagtggggaaaccatggcagtctcgaataaaaaatcaaagggaagacttgggagctttttgatacatttgatcagtgtagtcagccagtccaaatggatcatgctccccaacagattaccttagctaacttaacattcaaaatgttagctaacttaacattcatttagctaatttaacatcataaatgtactagggcattgcaaaacattctctgctgttgctaagtgatcatcatttattaagcaactgctatacagaaaagcccctatctggatttagacacactatgaaagtaacccctccccaaatatatctgcctccatgtcaaaagtatttagcatgccacctcttatatatgcctaaaaatgcatttctttgtttctcagcatcttcttcaaccagaggacggagtcaaacacgaggtgagtgctgtcactgggttcagtccaattcattcaacaagtattttctgagaagttaatgtgtgtccagccttgagccagggagtgtaaggagtacagaagaataaataaggcatgctttctgctttcgaggagcttagagtatcctgggaatcttccaccggctctatcgggaggggaagggtagcttttgacagtaatctaacaagcacgtagaggcaggaagcaaaacacatgataacaatgtggggcatcatttgtcttgctgtggatcatctgaagatgcagataccacatctgctttcacttctggtctcctggctgactttaacaagatatgctctaattgcctttacacgtcaaaagatgagcaaaatctccccaaattttttttcaaaattcatccaggagataaacagctccatgacagttttgtaatctagtcatgtagacaatgatataggagagaaatgtggtcctgggagaagcagcccttgctaagctttgggcagggtagggggcagcatgttagggctgagctgaaggcagaattcttcacaatgacccacctagacttcctatgggccttattatcatcaataacttggaagttaggagtatgccaaccactcacaactttaggctgatagttgaaagatgccaattctccacctgaagctaactaataatgttagctaccagcttcctgcccctcccatctctgaagaggccaaaatggcaagtaaacactctggcttttagaatcttttgccaatgcctgagaccatggacgcaggagagaaccttggttctggcagccatgaggtggatgatggggaaaggattgaccattgctgattgtactggaacctccttgctcagcctggaattttattagaacatctccagctgcctgggaggtatgcagttggcaggatggggaattgttggaggtagggaggtctccctttttaagcagcactcttcttgggcacacctagatttcctgtttccagagctcagaaatgtcagagcagcctaaagggccatctgctgctaggagttcagtgtcagggattgtgatctaagctccttcattcacacccttctctatctcttcccttgtacagagagtgaaattcgagttcgactgcagagtgcgtccccatccacccgatgtaagtggtcatgatcttgctgaaaagaaagggtccagaaatccagggctagtgctgtgtgtgtgtgtgtgtgtgcatgcgtgtgtgtgtgcatgcatgcacacacatgtatgtacatgcatgcaatcataaaacatctttaagggtcttctgtgaattggaccctgggttaggtggctggggttaagccgctgagtaaaccgtggttcctgctgtgtagtagttcacagactaatagggagacagtaagtcaaccaaccatcgcaactcagtgtggtgagggaacagggaggagcagctccacggcagcccatggagatcaggccagagaagacttcccggggtaggtgttacctgaaaggaaactgaacagtggatcagttcggctcaaagggatgagcctgcatgaggcatcgaaggaacagttcaaagcaaggacataatgggatagtttaagattagagaagggtcagtagtagagtataagaatttgaactttatttcaaatgtcagagaccccccagtctctgtcgatggaatatgttagatacctgttgttcttgctagaggtatttaacaacgttttgaaatgagctcaactttaggacagcagtcatgttcaaggagtagaagaaagaacatggtcagtggctcaggacagagatgggtgcttgtccagagagctcagtacctagggttgtggagtctgactccaggcccgacaccttctcacctgagtccttccaggcttaggggtggtgaggcgaagggagttggggttgagagttccttcagcatacagtgcctgcaaacctgtgtctcctctcatgcactccccatgcatcctctcatgcactccccatgcatggtgcctcccacctctcctgcttccctgcttcctgtatgggaggcacagggagcttgctccacttttcaccttgctacaaattaaatcagccagatagacttgaaattaaatcacacgtgaacacagcataatatttaggagttatggcccacagattccttttgacagccccaggcatacaaggtcaaggacccaatatcagatgcatcctgtgcaggggatgagactgctgttgaagcatctgtttcaagggacctggttctctaactgcctgatcctagataatagtgtcttccagccacagaatcattcctgtgatgtttgatgaggtctaattaggaaatatctcccaagcaccttgacctccttgtgagacgcagaagatttttgaggctaatatgacaaagtaccaagttgataagtgctattcattagtaaaatgtgaatattataaagccaagcaaaaagttccaatgtgtgaggcagatgccattctccccagtagtcagaatgccacaaatgttccccccagttgcacagggactcaggaaagaactctggacttaacagaaacgtctgtggattctttcacagggacagaattggatgatgttaagcgtttgctcaaggggagtcgatcggcaagtgtgagccccacccggaattcctccaacacactccccatccccaagaaaggcactgtggagaccaaaattgtgacagcgagctcccagtcgggtaagtctgacagcccaggctgccgaggagtgtgagaaacaaacttacccatccaaacccaaagagtggactcagagacccagagaacagtgaaagtgagacttgaaattggggcccaccaaatctcattccagctagcacagggctttccctaatagcaacctgttttagggcatagatatttgtttgcttgtgacagctgcctttggtttcctaaattcccacaatgtaagactcagcaggcattgaattttatggtttagggggtagaggttttagttatgttgattattagattgattggatattccctactttccacccctagtactgggccctatccaatactcaggtcttcttttgtgtgttaggattaatcctaaccatatccacccctaatgaaggggtttgcttatagctctcttctaggttttccttagagttagctttaagtgttccttaggtgatttatacacttcccatttgcccttttcccttccttcttgggtttcttttaccagtcccttgagtgtaatgagttcaccctcgtttagctgttcgttgtcacgtttcagtggttaggaccacttgatagggaccttggcagcttgggtggggcttatcttcttttcaagtcttaattagcaccgagatgccaggctggaagtggtgaactgtgaactcaagaggcggggtttgagttcgaagtccttttaagctaaaggatgacagggtggaggatatggccagtatatgatttcttaaaaactggtttttggtttccatagtaggaagatcagtagtcctatctaaatatgggagtccatatcataacttgtaaggggacagtccaaagtctttgcttggggctgttctaatcctaaggagtgctactgggagacattcgaggcattttagttgtaaagattagtttagtaatatgctttttgagaatttgacttattctttctacttttccagaggaagggggatgccaaggggtatagtaatcccatttaatgtgtaaactttccataattccccttagcacccttgaggtaaagtgatacccattgtccgaattaatattttttatcaagacaaatctaggtataatttgttttaagattatttttaccacattcctggcggtggcagttgggaggtggaattcctccacccagccggagaggtggtttaccattaccagtagatactttagtctccctattttgggcatttctgtaaaatctacttgaatgctttgaaatggccttaacccaggaggtcttcctctggtagtctgttttctaactacttttttgtttattctctggcaggttacacaacacccacacacttgtttagcaagggtatagatccctatacacccataattttttagtattgcatcacacatatcctggggaccccagtgaattcctttatgcagtatggacatcagttttctcattatgggtttgcttatcatttctctcccatcagggagcacccacctcccatcctcagtttgagtggcccctatcttgcccagctcttcctcctcctttttagaaaatttgggttttaatatcaccttagggatctgtgggattaggctaaacaatctaacttcttcctccagggaagcttgcttagcagctttatctgcaagcctgttccccacagcttctatagttttgcctatggctatctctgctagaagcaagaggctttttaaaacttgtttgatcagttccccatgtacaaattctttctccctgctatttattaggccccgctctgtccagatctttttaaaggtgtgtactattccacaggcatatttggaattagtatatacagtgccttcttggccttctagaagcttgagggcctggttaagagcatgtaatttacaggtttgggctgaccaattattggataatctacctttttcacataaggattatttgtttccattaatgacagcatagccattgtgttttttaccatttattacttgggatgacccatttacaaacagtctcatcccattatgtaatggggtggtttaactttagtttgatattaaggtctggtttaactttagtttgacattctatgatatccagttatgatttgatgcctctttattctcctctccttttcataagaagctggctggattcaagaaaatacatgttgtcaagactaaattatctttttgtaataatatggcttcatattttaaaatctgggaattagtttaccatctcccaactctttgatttaatatattcctgacctgatgtggggtgctcactaccagggccctgccgaagatcaacttcagactcccctccgccagcagggccatggcagccactgcccacctgcacctttgtctccccatctcccgtcttacatggcctctctctctttccctgtctctctctcttcctcttgtactcttttttccttttacattatgtctctccccagtttcaccttctgtgtctttgatctctgtcttttcccgtctctttctctttcgcttattttcttttttctttttttttaatctctctgtctctgtcatccctgttttctctttcccttacactcagtttcttcttctttctctgggcgccagcgcactcgccatgttaacagcttacttacattagctctctcacactgtccacctttatctcggctgtttgcttcggctctgcagctcctgccgcccccacacctgcagctgcacagccggctcccttgccttcagggtcagcagcttaactctttctctctctgagcaccagcgtgagccatgccgtggctcccctctgtccgtctgcaagatggacagctttggctttctctctttctctttttccaattcgtttcttacttttcgcaaaaaccttctaattccttaattggctttttattccatccatcaacttttttgcagtttcttagtaatatcaggccagcttttagtcataaaattaacctttaaaaggccttgccctactaggtcctctggatgtaatcctgattttttttttttttttttttttttattcctgagcctctgcagaaatgcagagggagtctcctcttttacttgttgaagctcgaatgcttttgagacattctgtgtccttgaagtggactctttaatccctttaattattcgttcccttaggtcctgcatttgggcccgatctttggggttattgttattccatctgggatttgcatttaggaatttctgctcagctggcgggactccttgcccgagaggatgctgtctttcccaaatggtcatggctgcccttttaattattcccctctcttcctcaataaacagaatagtcatgattgacatcatcttagcccaagtacaaaaattgggtcctaaaaattgatctagctgctttgctacaccgaggagattttccaagagcggccttatttcctatttaaaattcctaaccttagtacttgttagaggcacacttacatatccaacttctccctgtcccatagggacttctctaagagggtacatattagacatctgctgtttagaaggaatagggaaattctcaatgtccttcttacattgttctaattctctcctcaagtttggataaggatttacgggagcattgggtttagcttctttatgatccccagattcctcttcctccagccttcctgttactccctgatctccctgtcctctactttgtgagatgtaaagtggaggcaagcgtgttatgggattccagagctttttattgggtgagggctttttactatgctcttttttttcctcttgaagcgggagcatgggggttaattcactaatttaacaaagagcataacccgtctcctcttgtgaggatggggttttattattcacatagagaattaaagcttggcacacccaatcctcgtctgagccaaacttaggccaaaagactgaaggctgatgaatgggctctttggcccagataaaacagcaatactttatcattttttgcttttccttgtccctggttcaagggttagcccttaaaaacctgcagcattttccttaatggactatttgggagaatgttagagggtgtctttttagttccctcttttgttgggcaggggctttaggtgtttgtttagggttgtcttggtgcattttgttgcagcccacaatgcattgcaatcctagttagcttaggggctcttcaagtatttgacttatgacctaagtagctgggcaagctgataagaacagacaaaaatgagctattttgcagtctagtaaacttttaccttagactaaacttctttggtctgagtgagggaaactaagtggggggacctggtggggaaggggagaccaacaagcaggcattagctatccaagcaggggcctagtatatcctgtttcttctgtagtttgctgacctaagctgatttaagaaactttgtcttggaaatggaccactgtatacattatttccttcaggagaaaaggcaacaaggtggcagatctatcctggcctggggattcaaccacgccttggcaggcctttcaggctttgccagagaccttgaaaagcactgagcaccttctcttcaagcagtgaaaaaagtgggctgtacctatcctacccctggctggtcacccattccatatgcatagcccagccctaaatcctagagattctctcccaggacagtatgttggccagatcccccaaatgaagaatactggggaaatgtgtagagttttcgtgtattcattcagtgactatttattaaatgtctcctctatgccaagcaccaggcattgaggaaaagcaatggacaagagagacacagtcactgcccttgtggacagtgggtctctggaggaagtcagaaaaccaacatgtcccagtcaagtaggatgagcattgttcagctgttccatattacatgtcccccaagtgcaagataggttctgtggaaggcagaaatataaattagcagagccgtggagggaggtgagggaaaaagctagatctactatgataggaaacatccctcccattcactactggagaaaagcctagagattgtgatctttcttgtttttcaccctaaaaccaaaacatcagggcactttctgacctgcatggctggctccctctcacagacaaatatgcagaactggccccaaatatgaagaagcaggaaaatcctctcttgggggcacagtgtctggctggtacataggaatgtttaaggagggtggaaccagagaaggctgccaggcatgcagtgtggccccagaccaaggactcccctgcccaggcatgcaccctgcaatggccatggtgcctggaattctactgaaagaggttctcttcggggtctcatttgttgctcctgaaagaactgttccctcagcgtctttgaagatggaggagttggcaacagctggagaggaatgccattggtgggacagcccaccaggagatggggagccaggtttagaaggagaaattgttggaccccaaggcaaaatttggctacctcagattttaccaggagccagcaaaaatttctaatccaagagataatgatttcaccagctctgagatttcagatggaaactaccccaggttcctggactgagaaagttcctgaaatgtggggctttcaatgcccaaaccaggaaatcccagcaaaatgaggtgactagattccccagcagggagtgttgatttgtctctcactggggtgtgtgcatgtgtctgtttccagtgtcaggcacctacgatgcaacgatcctggatgccaaccttccctcccatgtgtggtcctccaccctgcccgcggggtcctccatggggacctatcacaacaacatgacaacccagagctcatccctcctcaacaccaatgcctactctgcgggatcaggtacctggcgggcagcccacaccctctctcacccctgaactcggcatgcctctatcctggagctggatgaccctcagaatgtttgccatcctcagggcctcctggagaggctttctgtggccaaacatcccaggagattccccctggaacttcagttcaattcaatctagaaggtattgcttctggtgcgtcccctttagaatatatagcacggtgtatcaggaaaactggaaagaacactgaaaatggatgtaggagatctagtttcatttcatatgaattgacggtggagccttgaataagtcatttgacttctctgagcttcagggaccatctctgtaaagtggggtcactcacaagagagcctttggctggacccactgtccactccaggtttgacagacctgagatcacctgttggctgtgacccaaggtgcagtgcaggctagtgtttcattctctgctgcaaggcaagagcctgtttttcctaaaaacaaaaatttaccaaaatataaaaacccaatcctggcatttcttctggtgcttctgtggtatccaaatctctatccctatctgggccagatgtccctctcaccagccttcctccttgcccctgcagtcttcggagttccaaacaacatggcgtcctgctcacccactttgcaccctggactcagcacatcctcctcaggtcagtgtcaccatcttgagatgacttttccaggctatttgcatagaagtgttaggatgcttcacccaagagcatgaaggcctttcttccatgcatactgcagctcagaagcagaggcacagggttgcacagaacctgccttcaaccacagggagaactcagaccccaagggaaaagtctcaggcgaggggacgtgagcccacattgacgtgcgtattctaaggtggcgcctttattttctggaagagttggaggattggaaatgaagggtctaacggaatcatcgtgtaggacattttcagggtaaaggcattgttaatttagaaggattttatttcagatcttttaaagaaaaatagaattcattgagtaactactttcagatctttctataaatataacacatagtttgttggagtaactatattggggtaaataatgttactgcttatcttccaatgcaaacataacaacaattttaaagaaatatttatttgctatgtttccacatacatcttaagagcctatatgtaaatattaccagcctacatcttttctttttaaaggagtctgccttctccatgtgataatgtgactaataaacataatgatgtgggccttgtttatttacttgactgatatagaggcaagtacaagttttgcattcagattttcagcaccttcctccagttgactagaggcccaccaaatccagaagacattggctacatgttttatttcttctgcctttgctattttgctttgcaaagtcctgataaaaaccaggtcccaagggaaggtgggctgataccagatccttgatattgtgccctaaataacaaagctgctggccaggaggaataagcttctgcacgttgttgaaaacaaacaaacaagcaatcaaataaacaaggagccttcgaaaccatagtggaggtgggggagttttatgtgtttgtgtcaggagaaggaagggctaacgggaatactaggagtctgccaagttagtgcctctcagcacccgaggtgtctgtgtccatatcctaagcttacagttcccacactgtgcaccaaggcaccccagggtgtcacaggaaacagggaacccctatgatattttaaaattttgagagatctgtcagcaacatctgtcagaccctgtgcaaactactgcttttaacttggatggacctaactacgtaataagtagaactgttagtaatatttggcctggggtaggtaggtgggggtattaacaaatttactacgttacaaagagtgtgggaaccgaggaagtttgggaatctgttggcaaaaccattgatcatgaaagtggtttgggactctgggggccgtcctaagccagggggcatcccccgtgctccctgtactcacctgaccttggttgctttcacagtgtttggcatgcagaacaatctggcccccagcttgaccaccctgtcccatggcaccaccaccacttccacaggtcagtaggctagggttggagcttaggcgctggaaagtgacacctctttgcagctacaactcactgaattaggagacccaaaatgtccctgaaaatcagtcgacctttcccaccaaagacacaacactcaagatatcaatcttgatcattaactggctcagacatgagtcaagcacacagggaaggctgtcctgtcaacagcatcaccttgtaaggcatcacttgtatgttcctgtgtctctcacagccaaactggttaggttggtggtcttgccagctcactgctgtccttgacagcccactgtcactgcaaatcaatcatctggttgattttatggtgcaccccctacaggttgccaccgctgtgccaacctgggggtgactggggacatgaaacctaggtcagcctttgcctccaacttgcctgctacttaattggaagagaaagtctaacacacatgagacaacgagaggctctataagacaatgggaataagtgataggccatgcagagcaggtgttaagggctgtaggagttcaggagagaaggagatgcatgggggtctaggaggacttcctggaagtagctagaaggatgaggaggattatacctaagaacgttccatctaaaccctcattactgtccccatggctggagagagttgattcatcatctgcttctcactggagagggtcgggggtacctctctgccagggctgatcaggcttctcctgagtcacctggaaccaccctcccatgctgacccagcttcctttcttgcagcatatggggtgaagaaaaacatgccccagagtcctgcggctgtgaacactggcgtttccacctccgccggtgagtgctgctcccagctgccagggttcaggctggtgcacagggaggattactctgcagtaatcctgcctgtgtatccttccaatacacatggtatactggaagaggaaataggacccatgagtggtcttaggcctgcaaacgcaacttgccccaaaggcctcttggatgtttccatgagtgaataaaggtgaacattcccatgaatgttcctatcagaagggggcaggaagctccaccctccatacctgcctagggccaggcacttgcacattagccactgcccttgactggaagcctttggccttcacctgttacatgcagctcatggagccctcagaaactgctggcaccctccctgctttctacaaaatctatatcaactttgtccacatatttcagcaccatacagtgagctgtttcctccattgttctaatcctagtgtgttgtcttccattcaacaattcatttattggaaagcctttactgagcaccttctttgtattagatggacagtgttctaagtgctgacagtacagcagtgaacacgacaggatagattcctgccttcactaagctgatgtcagtggtggaggcagacgacaaacacataaagtatgcaagataattacagaaaaggatacagattataaggaaagcaataagtaatgtggtagagataggagtgtgtgtatgagggtgaagtgctttagatggggtagtcagctaaagcctcctcaagaaggcaactcttaagacctggaggataaaaatgaacccaagttagttaaggaaggacttacctgactgggggacttttacccattcaataaagatcctataatctccaggaggggaggcagcccccataaaccagccatccagagcttctgacattgacccaaactcttggtggccaggcccagccaggcatagagggtgtccttggtccccaagatgcttcatagtaaccactgtcagcaagaacaagagaccctcatacacacctgctaatttacctccctcctccttctctttcttctccttcctcttcttgtcttttctcccctctcccttctcctggcacatgtccttccttcttacccattttctttctccccagcctgcaccacaagtgtgcagagcgatgaccttttgcacaaggactgcaagttcctgatcctagagaaagacaacacacctgccaagaaggagatggagctgctcatcatgaccaaggacagcgggaaggtctttacagcctcccctgccagcatcgctgcaagtgcgtcagatcctgtgtggcttgggtttcagaagaaagccaaatagtgtaggagaccaaatgtcctagcaaggtggtttgggaccctatgagtcatgaaaccatagccatcccattctaatgaaaagcacctgtctgaatagtatgttccagggtctgccttgaatgcagatgagctgagaaaattcaggcaaagagctctcagagaggcatttgggcgacagcaagtctaaccgcaaacacagatcaggggagatgaaccccaggaaagaggggctcttcttaccagtctaacctagaccttcccaagcagggtagtgggcaagggcggggggaacacaggacagagttgagaggttgagaagagaatatgccaggttataatgggttctgtacatagcttctttttcagaagacaccctaaaaaaagaaaagcaagctgcctacaatgctgactcaggcctaaaagccgaagctaatggtaagaacaaatatgattgttgtccaccttgacttcagccaggccacatttcatttcattgtcttcggagaccttgctactcaaagtgtggtccacgggccagcagcatcagccacacctgggagtgtgttataaaagcaggatcccagccctagctcagatctgctgagtcagaagctgcagttcaacaagcttcctaggtgatttgcatttgcattactgaagcaaaagcctgcctctgccatgtctacgaaggcatttgttttctcattttactttttctccataatcttcagaactaatagaaaaatgctttgcaaagcagttgttagctttatttttttttcttcccaaatatctgcgttctttgtctgataaccacatttcttgacgatgccctataggaatctctccaaatcactgatttcagggaggtcagtaaaggaaggaaaatgttaagtcatagaacattttcaaatgaatgccaatcaaatcagttatcactttaacaaggtgagagattggaacctgactgtaagtctttaaagttagcagttcctgacattttaggggtaggtctagggctgtggagtcaaaagatccttttcagaatctgatgaaaggtatgaacaaattgccgagtaaattctacacatgcccacaaacactcaactttctttttctttttttgtttttttttttttgagacggagtcttgctctgttgcccaggctggagtgcagtggcatggtctcagctcactgcaacttctgcctcccgggttcaaatgattctcctgcctcagcctcccaagtagctgggactacagtcatgtgccaccacatccagctaatttttttgtatttttagtacagacggggtttcaccatgttggccaggctggtctcgaactcctgacctcgtgatctgcccgcctcggcctcccaaagtcctgggattacaggcgtgagtcaccgtgcctggcctaaacactcaactttcaaatagcatcacggactcaggaacaatcctcctccaagctcatccttctcattcccaattccttccaccccaggtcaggaacttgtgttcagagtcccttaaccaagaaatcagagtcatttctcacaaccacacttattgtttgaatgcaagcggcacccataacttggtgttccaaaaatgttttgaggtgttaaggtttaaggtcataagagaattaaaacatagtgctttcttccaccattaattgtttgccaagccatgtcttcatggatgtaattatcgcaaatatcagattagtgaggactgagatgctggatgttcctgcacgtcgttgaaagcaagtttattaagaaagtaaaggaataaaaaaatggctactccataggcagagcagctagctcctccagtttaaaagctcaggtcaatctgtttgtcctttcaggagacctgaagactgtgtccacaaagggcaagaccaccactgcaggtgggtgagaaccgcgaaccctgcagtgacaggatccagtggggctgcttatggctaatggaccagatgatggtccctcgcctggaagcagtgcagtgcacagaagccaccagactctaaagagtttccctaaaggctcagaagggagcagggtgggggtcaggggagtggcaggctgtgggtcagaggtggccgcagaaggagcttagctcaggggatgaagctaacaggccccccgcccccagctgcccctaattaacacttgttagttaggttgtctcctaacacaacagggtgactgtgtctttacacagcagctcaagaagagactaagccatgcacgcctccagccccttagcctttcctcatttccttccaccgccgtgtgatagaagcaggtcaagtcctaccaccccattttagggaactaaaaacacttttcattacaaaaaacattgttttaattcactaggcacccctgaagagctgagtataattctaggcactgtaaggattaaagaaagcactgtgtgaactgaggcatggagatgggaacgctctaggtttgggcccagtcagatgcagaccaatgctatattcaaaataaagatgtttaagcctcgtgctgtgctgctaactcctctactattttacattccttgtcctatttcattcaacaaccttcccaagaaggaggcaatcttttaaccccatgttataaaaacggaaacaaaggtgaagtgaccttctcaggttcacacagctggagccaggattgccagacttctggtcagcaccagtcaggccctgtgctcagtccaggagccagccctgtcctgggtggaacagcacaggaacttgaaagcccccagtcgtagtcactcaggccagaaagtcaccaaaagtcagagaatctggagggaaaaggcaggagctgcctgcatttgcttcattttccctgtctctttcacagatatccacagctacggcagcagtggtggtggtggcagtggaggaggtggcggtgttggtggcgctggcggcggcccttggggaccagcgccagcctggtgcccctgcggctcctgctgcagctggtggaagtggctgctgggcctgctgctcacctggctgctactcctggggctgctcttcggcctcattgctctgggtacgtggcaaaggcagcagggcagcctgtgtggtaggaggcaggccagccccactgcctgtcagaagggcaggaatctgtgaatgggcccacgtgttagggggcgaggggacctgaatgcattggtgcagacccttgttaccgcagatgagtaaactgaggccccaggaggtacctggccaaggacatgctgccacttagtggtggagctgaatttggatgcagcgcctgatgctcagccccacccttgctacacctgtaggccctggtctaagcacctggctgcccttggtaacaaggtcaggactttcttagcctttttgacttttgctgtttccaagcagccatatctatttcttttctttcttttctttttctttcttttttttttttgagacggcgtctcgttctgtcgcccaggctggagtgcagtggtgcaatctcggctcactgcaacctccgcctcctgagttcaagcgattctcctgcctcagcctcctgagtagctgggactacaggcgcatgtcaccacacctggctaattttttgtatttttagtagagatggggtttcactgtgttagccaggatggtctcgatttcctgaccccgtgatctgccccccttggcctcccaaagtgctgggattacaggcttgagccaccgcgcctggccagccatatctatttctatcagctctcacaccacctcacagggagagtgaggacaagctttgtcacccagctcagatgagaagactgactcccaggccaggtttctttaaggctctgctgtgatgctgagcagctaatcctgctggtggccacggcagattatctctgcatgagtattctagcatgaagaagccaccacaggccccaatcccttgtgtcaggctctccactaggagcgagtgtatggaaggcgaaggaccgggccctcagtgacgcagtgtgtgtctgtttgttgcagcggaggaggtgaggaagctgaaggcgcgtgtggatgagctggagaggatcaggaggagcatactgccctatggggacagcatggatagaatagaaaaggaccgcctccagggcatggcacccgcggcgggagcagacctggacaaaattgggctgcacagtgacagccaggaggagctctggatgttcgtgaggaagaagctaatgatggaacaggaaaatggtgagagcatcgccgggcacagggccagctcccctgagtccctttcttctttgcatctatgtggtatgtgtgcatgtgctgtgagcaccatcatccggcccactctcggcctctctcctcccctgatcctctcaatagcgctgagaggtaggtgggaccaagactgtggtcccactttactcctggaaaaactgagttctggaaagaataattgctcaagatcactggactagccaaatttagaatctgatctctagtctttgcctcagtttcttcttcccataccatgatccccttattgtgtgtgtgtgtgtgtgtgtgtgtgtgtgtgtgtgtgacaggagatgtgaagctgactcaggatttgctttttcttgcaggaaatctccgaggaagccctggccctaaaggtattgccatggattgaaccttgtctctgattcatttcctgcagttggaagtgagttttctgggtagattagaagcctttttctttgttctaaatggaaggatgaagagctgaatgatcttatggtatctgttgggaggtatctgttggttttagagtcagaatatcttagataaggcagcatctaagagaagcccagcaatgagcccaaatgacatagactctgggactgggagggactcgccgcatgtcgcctcaccttgaaatacagtttacatcttgtcaaatggttttaaaatacaaggcagagtatggcctttgggttcttgccccatctcacagttttcatatctttctggtttcaggtgacatgggaagtccaggccctaaaggtaattataacatgggcatttttaccttaaatattagcaagtgttaattgtttcaaacaatcagcaagtgtcagaaaacccaccttgcactccaagaagtaatttgacaacagatgggacaggtgtgtgaggaggagaggtttccaatcccagggacctttggctggacacagagcagttttccttggtccagctgaccgggattggcgagcttccctgtgcacaggaatctccaaaagagtttgggccacatttcccgagcctttgactcagggggtatgcatgtgggcaggagtctttatcttagtcatccacggtgattctgcagccagaagaatactgagcaccacgttcaagatgacaggatcccacctctctccagctccctcctcactccctaggcaaccccagggcaggaagtcagctcctccactttggggccctcgagtctcttctttcccttcagatccttgccacccacaccctcgcatatacctgggtcattgtcccagccctccttccccaagtctccagcccgcacacccctcctgaccatgttagtggtggggactgatactgccagagtacctgaacctgcagttgtcagataaaatacaggactcccagttaactttgaagataaacaacaaataatttttcactataacttgtcccaaatatttcatgggacatacttataactaaaactatgtgttgtttatctgcaattcaaatgtaactggacatctgcatttttatttcctaagtttggcaaccctacctgaatcccactagtgactgctttgggaattgggcacagtcttctggctgaccactctctcttttgcctttgttcctgcaggagatcgagggttccctgggactccaggtatgtactctctgatgacctccaggcctgccagtgttgcagctgctcaatcctagctgatggcttctgggaggaaaacaggggctgagatatccttgtgtgttcacaggtatccctgggcccttgggccacccaggtccacaaggaccaaagggtcaaaaaggcagcgtgggtaagaaacacatttttctttattcatttattcctcattctttcattcatttaataaacattcattaagtgcctgctgtatgtgaggccttgttttaggctctggagagacaccagtgaaccaaacagagaaaccctgctgttgtggagctgagatttgggtttgggagaaagacagtaactgtgagaaatagtgaagtctatagcagtttacgggtgatgcacgacatgggaaaggagagcctggagggattttgggaatgagagctggggagagtaattttacacagggaagccagggaaggcctccctgagaggccaccatttgagcaaagattcgaagggcaagaaggagccaagcaggagagatctagggaaaacattccaggcagagggagcagccaaggccaaggctcaggccccagggcaatttttaaggagcatcaggaaggggaagacctctgagctggaaagtccaaagggatgggccgagaggaggcaggctgtgtggggcctcagaggccagtgtaaggactttggctttgactctgggtgagttgagaagccatgtgcaggtttggggcagaggtagaacatgatctactcacattttcaaagggtcactctggcttccaggttgagccaaggctatggggtccaggagagaagcaagcagggaggccagggaagggctccaggcaagcgtctgccgtgggaggctgcctgtggagccgttagctggggtacgggatcctgacttggaggctggccatccctgtctttaggagatcctggcatggaaggccccatgggccagagagggcgagaaggccccatgggacctcgtggtgaggcagggcctcctggatctggagagaaaggggaaagaggtaagaggcaattccttcaccggcagagttagctatgcctgtgcttccttctctctgtcaacacccgtccctccttcactctgtctctgtttctccccccttccttcatttactgagcacccaccctgagtcagggtctgtgctaggccctgcagagacgctgggcataggctgggctacagggccaggcctagggctgagaacccatctgacatccctggaatccaccgggaaagtggtcacaggagcagtggccttcctggagttgggtggtgagggtgaggagtcaggccgaggtggggctcagggggcagggcagggcagagtcaattgtaaggtggagtggggcacagacctttgagcctttcctagctggaaggaggccaagagggaggtggggaaggccccagacataggttcagtgctggagaggctggggaaggtgttgcaattccatccttaactatgagactgcttttgtcaggggaaaccaagacagataccagaagtcctcttaatgctaacagactgtgagcaggaagctttattttcagctttactttctctttaaaatattgctcaaccagacaataaaatttattgagtgcctactaggtgtcaaactccatagactataaagtctctgggggtagaagctaaggagttttgctgataagtggcctcactggggcaccaaatggatccaagaccactagcagggtgggaagcatcccctccaaatgacagtgccaggatagggggcagccacactggggcctctcccaaagtgctcatccctccatttctcctcaggggctgctggtgaaccaggtcctcatggcccacctggtgtcccaggttctgtgggtcccaaaggtaagtccagtgtgcaggaaggaatcaaagttttccagaggagaagccacattcaggatggatcacagagaagaggccctgggaccccagacagccctaaccccctgccccaggcctgtgcaggggtggtgggtgggtccaaagagcatcccccagaaaagcagtccctggggagtcaagactagggctgtaagtttagccccataatgggcttggggccatgtttccatctctcttcaatggccccgttatgtgatccctaagtgggtggatggatcattcaggaaatcagaagttagaccatttccttgactgactgcggcccagatgcacacaccaaaagtaacatgtctgggcaacccagggagaatgggccccttctcaaaacccaaatgttctactgccccagcccaaatgttctactctgaccaggaaagagcaaagggtagtttgatcccacccagctgcaccccctccctaaggaggacatgcactggggtcacccctggcctgcaatacactcacacagccctcacctggaagacagcgtccctaacccccacctgccctgcaccggggccagatgtccccacctgtatctgcccctctgctgattgctgtcttgtcctccttctcaggttccagcggctctcctggcccacagggccctccaggtcagtttgctgcttcttgtaaataggttctgtttccagggcaaaggtggcaatgttaaaaggaaaaccaaatatttttaaagccaaagaagcaattataaagcaagcctcctagagatatagaattcaagtctgcatgtgtgtctcctgtggcagaggttgggctccctgatatgtcctgtccagatcccttctgacctggcttagggcttgagaccctccagcagcttcagcaatggaagtccccatcctgcctccatctgagcaagcacctgcctctctcttgtcccctatggccacagagcttgtcctgctgtcttgagaatcttgagctgtggccagtgcctctgccaagactcgacaatgtgttctaatgcctgttcatcagcagaggcaaggaacctgggccaaaatgacttaaaaaggacttgggaaggagtccatggaaagcatcctttgacttttactatagggtgtgtgcatatgtgtgcctgtatgtgtgcatgtgtgtgcatacatgtctcatcattccaaagctagggatactcatctgtgtgcatggtttcttctgccgggcaggtcctgtaggtctccaagggctccgaggtgaagtaggacttcctggtgtcaaaggtaagctggagggaggcctggggggacagtgagggtctgatggacacgacccacagcctatgcaggctgacaagtgcaagaggggaagaagaagtcaggattgagggagcctgtcttcagagacagacattgccccttcctggttgtcccttgtagggcattttacaccaaggtgtccatttcctttttaggtgacaaaggaccaatgggaccaccaggacccaaaggtatgccactcactgctgctctgtcattaccagggcctgcctcactcctgggagcccagatgggaccctcactgtagggtctgagggtgcacaggacctggaccaagatctcattctaatccaacctctcagatagggaaactgaggcacaaagaagggaaacaaagcactaacatcacattgaattctggggtggtgagtgtttctcggggtggtgaagacacagaattccaaggcatctgacctcttgtgtccatggcaccaatttgtgcaacagcaggggctggggagtcagtttgtagggggggaactgactctgccaaagatcagatgtgctcctttggctgcattaatgctgtgtcctcaccaacatccgctgacaggagttcacggatacagtgagaactaccctgcagccggggaccctgttactgggtgagagtgttttccttgctcacaactgtggctttttccacctcccccttgtttgctttaggtgaccagggtgagaaaggacctcgaggcctcacaggtcagtctgtcatgggaatctactttaatctatccacgacttttgtaaatccatcagtcactaggttggaaaaaatccagaagtaagagaccgaatctgtttaaaacccttcagggaacttgtgatctagaaaaaacacaagatgagaaaataaagcctggagtggaggataaggaggtatccagatgtatagtccaaacagtaaatgtttggagcaaaaaagaaagtgtaggattgtctctgattcttttggggaatacagttgagaaaattaagctcttcccgaagcagcagaaagtttgcaccccggtatcctctcaaccactgacctcctgccaactggcatgattataaaggaaattgacagtgataaagctgtgactcaaggggtggttttcagtttccaaggaaataagactcatgcacatgcccatgattctgattaggtgtggtttctggttgagcccatgccacttcccaggggttccaagtggccctgaccttggaatcaaagcagaagctgcttccttgacctcttggaggagggagcagaccaccattgttaaagcatacacagcttgcaagtgtccaaccagctagttctttgtcctttgcaggcgagcctggcatgagaggtttgcctggtgctgttggtgagcccggggctaaaggagcaatgggtaagtgttccaaaggaatggattcagtgagttccccatctgaggggtcaccacgaccctggagagatccgtcttctagagctgcctctcctactctctaatctgcccactcctggtagagtctcccttgaccagtcatttctgtgtctgggcatcctttctggggatcagagagctgcaggtacctctgtgggtttctttccactttgggagaggccttgcagggcatggtccattcacctaagagctgcctgtgagctccccactcccctggggaagacagtgttgaagtccttaggagcctcaagtgttccaggaatcccagggctagtctcatggccaaatccaggtttttacccttttgttcacctgaggtgcctgtcagcctggctgcagaaactgaccaagaatctcagaggtagccaggtgcagtgattcacgcctgtaatccctgggactcaggatgatcgcttgaactcaggagttggaggctgcagtgagccatgattacaccactgcgctacagtctgggtgacagagcaagaattcatctctcaaaaaaaaaccaaaaaaaaaaaagaccatgttgaggatcaaacccaagaagggtttaagccttacctgtggagatgcagcatgtgtactctcgttcacttccccagctgtgagtgctgacactgtgctaggcaaatgagatgctttacctccctcaaggggagataagacttgcatgaggtgacaagtgtcacgcaaggtacagagtgctgtgaggatacagtcaaaggagagatttcttccaataggaaggacggaggagggggcatttcaagtggtcccaaaaagttggaaagattttaagcatgaccagtctggaaaattccatgcagggatgacagcacgagcagggaaagacaaagaaatgggaaagagcaagatatggtcccagaaggccaccattttggagagaggttacaataatgcctagagcagaggagacaagaacatggaggaccttgacttctaggccctcaagtaaacgcgacaagcattgagcatcgaggcgcttgagatgcaatgggaaggcactgaacaattctcaacaggaaaagagacaattgctggtttaggagaaggggcagtgggagtaccgtatccagagagtgtgacagacagggctgtcccgtggctgatggctgcgtgggctcctgggacacaatgtgcttcaaggccactgggacagtagagggaggaatcgcagaaatcactccaggagcaactgagagaccttgcttctactttaccaggtcctgctggcccagacggacaccaaggcccaagaggttggtcactcatctgctgcccccagcctcactcccgtcacagcccctgttccagcatgcagccctcagtccccttaaccatagtgcagaggagcatatagcatgtggaagtgtgcagtgtccagttctgttccccttctcctttccacctgccagcaagtcaattaggaaaaccctcagaaactatcagttcagatgtgataaccagtttagctttcctaaatgtaaacacttccacgttggccattctctctctaggtgaacaaggtcttactgggatgcctggaatccgtggcccaccaggaccttctggagacccaggaaagccaggtaacagagcaggaagagggagccatggccctgcttagtgtgtgtgtgctttgtgtgtgtggatgtaggcatgtgtgtgcgtgtgcatgtgcaggtgtgcaggttgtgggggaaggggtgtatatgtgcatggttgtgtgtgtgcatgcaggtgtttacaaatgcacccatgtgtgccttatcccgttttcctccagcagctcagcagggaactgccatagtgttaggttgttttgcgtgcagtggctgtaggccctggcacctctgggtaactaagtctggcaattcagaagagtgggattaacagctaaacataaggatttctagaaaggggcaaggacactcttaaaactgcagacttgaaggtcacctcgctatcttgctcctctgagcccttctcctcttgtcctcctctcctgtactgggccctcaccaacacccacgaggccgaggaggaagccattgttagagtctccaccgagagcaaagagcaaacttctcagggttgcaggaagaacaaatgaaaaccagccaagaaagctgtgtggtcaaggcgggtgggcattcatcgggggcctctgagagtaggggcctcctcagcctcctttggcgggtgcccagacaggagccatagagggggaacctggggcagcattgggatccgtgagtgttgagcattccggatttgtggctctcctcagattccaaaagggtctgtgaacccagataggctcagcaccattgcctgagaaagtggtgggtcgcttcactgcaaagcccgaagaactgctctccatccagagctgagaggtccaaggatgctggctgccccggcatgagacgtgtccttctgtacccactgacccctccactgcagtgtccaccggtttctgcaggtgtgggtgtggctaccagggatggcctccacccttcaactcttccctcttgtgtctgattttctgcaggtctcacaggaccccagggacctcagggtgagtcgctggatcattcccacctgctgtctcccaccttctcctggggtaactgcttgggccagggcttttcctgcagtcaccagagtttcctctcctccaccaactccctggcacacactccctttcactatgagtcgtgagaagcaccttaggaaggaaaaataggcacagaacaatctagaacaccattcgagtagaaatgagattagattgtgtgtcaattctgtctgcctgtgccctgttcccctcgggtgcaggaatctgagaggaaccccaagctcatagctgagctcccactagccaggagagctgttagtccagaggcccaagttcccccactggcatgacagggcatgggcgctcatccttgttcgggaaagcccagtttctctgggacagcctcagtgttaaagcctgtcctgtaattggaccattgtgcccccatatcactacattcatcccctaatttcctgaaagaaattaggcaaagattgaaaatgaaatcaggcagcagccccccagcagttgaattcatagggacatgcttccaatgctcttacagaggagttcagtagttaaaggcaagagggtgatgctgcattggactcaggaagccgagcccctcccctgcaggggagaagggagacagaggctgctctgcaggctccaggtggctcataaccccaagggatggaaccctccaaaactgagcccataggcctctgcctgctccaagccaagctgttgccccatttcccaaagagggacaagggctcagagcaagaggctccccggggttgtctagactaaggcggaaggcaaagctggtgcgtcccagggtttcagtcagcagtgtggctgtgctgagtgacggagcactagtgaccacccaagggtatctggaattgctgggccttcatcgtcctgactacttgttctaatcacatcaggacttcccggtacccctggccgaccaggaataaaaggtaagtgaatttccaaatgagatttctttcttttcactggccatttttgtggaaggaagggatggacaggaggaggcctctctctggccagagcctggatcaacagtggcatctagtggttctagcagagggctatgaggctgggagcccagggatttgtgaaccaagcccagtcctcaagccccacccctccccaaacacctccccaccccacaaacctgagccttgctttcatacttggatgtctccaggccactgttacaggaggttctagaagggcactgccctccccaaagcctttctgtgccctgttttgcctctaaatgcccccattagtgcttcatccccctggtatgtaggcttggtcccctcctaacaagtcttttcccctggggcaggagctacctttgcccttatcattcatatcagccttggtgtgaatggctacatcagacccttcctgagaggaggctttagtacaggcagagaggagtgttaagatgctactgagagggcaagtcgggtactcagaggggagctcatcctcgggggtctgactggggcaatgtggtgatgcccatgcacacagtgaccctcttgtccagttctgcctatcagacctcaaccccgagcaagttcagggacccacagtgctcagggatggtctttgtccttctgttcctttgattccaacacgctcctgaactttgacattctatggagctgtgctctgtcatgagcagtcactgtcactcttggtgggaccctaaaataaccactttccagaaatcatttccaatgactgattgggccaaggagttctttagggctaactaaatgtaattccaaaataatgataactgagtttataggtcccaggcagaccacactaggtccgtggatatgttcacgaatggatggtaccttttgtaagagtctcataggttttggaattcccaagaataacagaaaccttccctttttgagggcccgtgacttccagtccaagggggagttcagaccctgcctggacaacatgcacaagaggggccattttaccgaacgttggattgcatcccaacaaaacaaactcaagtgcttctcccgtcttgttcatgagccctggctgaaggatggtgagcagagaccatccctctgctttcctttaggggagagagcaatagtctcctttcattgtgtgaatgactgaattgctaacagaacttgagaaatgaaaaaaggggcccctaaagaatggtttccccaagtgagtccgtggattgtcagttctcagcactgcatccagttgatacgtttgggaatgtcctcttctcgaaagttctccacgcacacttgtattttcaatgctctgagacacaaggcagaaaagagatcttgttaacctttatataactcagaccttcttagacttacccactgcagagcccccctttaatcctgcacagcccctacaactgtcccacagagcactctaggaatcccgctctacctggcgggctcatcgcctctgtcctttgacctttgagtaattttcccacctaaggcgattcccaggcagaggtggtggaatgtgggagcatgaaggactctccagtcagccccattctgggctcactgaaaggcaagctttccacatcctcaagtgaagccacttctctgaatgaagacggatgctctggcctccagggactctggctgaaagattggggcttaatgcatcctgcttgccttccttcagttcattaaaatgcctttagcctgatggtgagaggcccagaagtgggtcccaaatgcaatcagaagccttgaaaatggcttattgagccactaattgatcctcagaacaaccactctcagccttttcctctcttcctaggtgaaccaggagctccaggcaagatcgtgacttcgggtaggcaggtcctagagggaccctcctttctgtgtctttcttatactgggcacctaccttgactctgcagcgttctgggcaggatgtggctgggagttttttggatcagtagcgggggaggagggaaatttagcagcgatgagaagaagaaatgccaggctgcccaccacaacctggcttgggtcccagcgcctctgagtgagaaaagtagggctcaatgttccatgtgccttctgttttcagaggggtcatcgatgctcactgtcccaggccccccaggacctcctggagccatgggacccccaggacctccaggtgccccaggtcagtctattttcttgctttgccccaaatcagcaataggtcttggcggtagtgactctagccatatttcttcagatcctgaaacccagggcaggaactgaacctggtaaagagaataaggagtttggcctgagaaaagcaaactcttgcattctcagacaatgaggtagatcagttatcctacttcacagcataggaggtgaatgtgctctcagcatttagagaaggggaggctgaggcttggagtgggtaaatgacttgcccaaggtcccacggccaataagcagcaggacaaaggatttggcccagatcagtctacctccagagcctgtggccaatcagaagactcagtccttgagccctttgtttcctcctggaaaacaatttgatattctgcatccagggcaacaaaaatgctaggtatctatttgaagaaaatatctccacatgggatggtgacaaaaatatgaaaacttctgaacaaagttgttaggagataaaacgtttattgaaagagcaggacactcactaatgcctgctctgtggtttcaactgtattaatacaagatgcaaaaaagaaaaaatgctggaagaaaataaaatgcccacacattgaagagttatggacaatttgtttcctacctttccaaagtgcctgttattttgttatatgtgtttttaattattttaaatttttatgtacaaatgaagtacacaacttaccacaaccaaggccagaatgtaccagccttccctcctgacaagctccagtgagaaggagtacatagaggcatgtagaagtccctaaccattacaggacagcagcagagggggcagtcccgcctgccccggggtcccggtgcctgtcagagatgttctcacgcaactggaccgcagggctgatctcgaattgcttattgctctcaaataagcaaggtggcctctttgggtctctgttccatgccttgggaggaattatgcctttagttcttcctatgaccctacatgcatgatttagccttttcttcctcaaccccgtttccaggccctgccggcccagctggtctcccaggacatcaaggtatgtcacaccctgcaagaatgcaaagcgatgggcccagtcgggaggactttcctctcagggtggacatgggcctctctgttctagatgacgtgaaaggtgtgttttggaaaaggaggacagggccagggctcttcaccggggtcttgcaaggtgattccctggggcttggggcagctgtcagagaagttctgggattacaagaggaccaggggcagacttggccttgaagatgagtatctggcaggagtgtacagctgacccagagagcaatgacaaccgtctgtgggttctcggctgcaggcccaggctgagaggactcactcccgggtcctttaaggagcccaggtggagactgccgggcctcccacctggacatctggagtgcagaacagcagaggcttcagcccacccggtccagcgctcactctgagctatcactgtgttaggagcttggtcttcagtgtttcaccgagtcttcccaacacccccgtgatgtagatctttttgaccttggtttacagaggaggaaactgaggctgaaagaggttgagaacttgcccaaagtcaccagctagacgtgtgggagcaggggtttgaactcagactttctgacaccgaaatccaatgtatccccatcattccacatgctcttatcagctgtcagggagcttgactatggtcctgccctgcctctgagtgaggggcacccttagcagatgaggtgctgcaggctcttgtgccatgacacagggcctggtgtctgggctgtgagggtagcctggagtgcctggaactgcagatccagtgagaggtgagaagtgtggcagagagcagcctcgtgacagcttttgctcatttctattttcttctctctatagaagttcttaatttacaaggtcccccaggcccacccggcccacgcgggccaccaggtgagtatcttggagacctttggaaggtggggagtttgggggacaggagattcaatgcacttagtgaggaagccaagatcctcaggggtggcatcagctccctgagctcagcatggcctcttccttgctctcttctgcagggccttccattccaggcccaccaggaccccgaggcccaccaggtgagagccgagcttaccactgggaggtgggagggggaggtgagaggtgggtagcaatgggaccctgagcccagggccctctgggctggcttataggaaagagcttccctgctgcctcctcctgagcagagggttcctggctcccctcttggcactaataagtcttgggggttctctttcctaggggagggtttgccaggcccaccaggcccaccaggatcgttcctgtccaactcaggtaatgtcagggagtcaagtcgcacctgttctccacctcagcccttgtcctgccacagactgtggccgtagccttgtggtcacaacctactcaccaggcttcctgctcctgacttccatggggatatgtttatataatcttcctgcttgctgcacatggagggaataaccatgtcaacccaaccaccctggtagtctggcctgagggagggagccagctctgcccttggggagcttctggcctaaccagggagacctggttcctatccttggggagcccaggtctgataaagtaggcaggatacatgcgcgtgaagtaagtgccgaccgtacaacatagaaacttgtggaaataactttaaagcaaacattaggccagaacctgttcctagtggaaaatccatccacccatccatttatccatccatctacccatccacctatccatccatccatccatccacctatccatccatccatccatccatccatccacccacccgcccattcatccacccacccattcatccatccatccacccatccaactatttgacaagtattgattgagcatctatgttgtcaggtgctgtgcaaagtgctgcttcttcacaaacatcagtgtccatactcaaactatttccttcctctgcagaaaccttcctctccggccccccaggcccacctggccccccaggtcccaagggagaccaaggtgagaacagtgtatcagggaacccagaagccagtatgtgtcctctgtttacctgctggttgccaggagggtttggatgaagctgaatgagctggggcatttttgcatccttctgccttatcccattaggaactcagcagcctggagcaaaggtagagggggaggcacaatagtcagaaactctacaaaggatagccacccaacattggcctagtgagaggagaggcacaaggaaccccaagttctatatctgctctagcattggagcccctatcccctcctccatgggcccattgaaaccacaacacctggttggtacctgtctcatagctctctgcctttttccctcaggtcccccaggccccagaggacaccaaggtacagtagagccggcatcaaacaaaacctggggtaggggtggggatggcaaaagctcacctcccaagagctttgagcttgatagaaaggcacctggtgcaaataagcaagagtagagcagtgtttctctaggaatggttgagtgtgtgcatgggtgtagtgcaagtgtgcgtgtgcgtgtgtgtgtgtgtgtgtgtgtgtgtgtggcatctctaggtactgcccaaagggcaacgcagccccagcaatcatggatcttggggaggctctacagggctgttagtgggtgagaaaagtgaggctgactgtccctcccttggtgtgttcctcaggcgagcaaggcctcccaggtttctcaacctcaggtaagggctgaaccccgccccattctggctctggccagagcctctccaaaccctggctgactgcactgtgtgtgttgttggcttccagggtccagttctttcggactcaaccttcagggaccaccaggcccacctggcccccagggacccaaaggtgacaaaggtcagtgagggagcagtgagaaggtggtgaggagtaggggtgagcctggtgcccagagcccagagcctgaagagatggcagcaagtactcatcagtgtaaagtcttgggagagagaagaggctggaggaaggaaaggccagagggtggaagggacaaggacatggtgatatagcctctgtacaagggagctgtggtattattacaaaaaggaggccaagagacatgggacgattgttgagacacacactaataagtgtggtttggcttaaccagggaaggcttcctggaggaggtgaggcaaacttctcattttggattccaggtgatccaggtgttccaggggctcttggcattcctagtggtccttctgaaggtaagaactgaaagtgaccaaagttcctctccacttcttctggtgaaggctgatcattccagtgaggatgttgctctattcgttcattcatttctccatgattcgttgttgattggctgtcttctccatgtgctaggacctatgagctgcctttaaggaggttacgagttattgggttgaggggaaggacccaggtacatataatgatacctaacaatgcagacaccgcatgatggagaacagacagacccagggtgctggggagttgagagaagggggatgcgatgttgggggtccttcagcaggttgcagaaggaaagggcggtttggcctggggcagcttcctagctctgtgccactttcagacagtggctgttacaggctgtcctttcttctcttctcggggacccttctccttgccactatcctatttctcctcctgagaagaccctccctcctcagaccatggaagctattcctgggcccgtttgtctgaccctagggtggagaaaccgacacaggacgctttctctttgctgcagggggatcatcaagtaccatgtacgtgtcaggcccgccagggccccctgggccccctgggcctccgggctctatcagcagctctggccaggagattcagcagtacatctctgagtacatgcagagtgagtagctggccgccgcaagccgtggggacaagaacatggagatacagtctctttgcaagggagctgtggtatcatcacagaaatgaggctaagagacatgggacgatgtagggcagtgggagtgtgtgtgtgtgtgtgtgtgtgtgtgtgtgtgtgtgtgtgtgtgtgtgtatgtgtgtctatgtgtccaggcccaggtcttccccctgcagagccaggcctacaggcctatgagctccccaacaccagccttctcatagctgcccccgacacagcctcacctcgcccacaccctggggaggaggctggcgcacgtgctcatcccctacacgcacatgctttcacaccacaccttgcatgtgctcatttgtcaaatgggtggctggctggagtcttgctggcccacagccctcatgggccacttgacccagctcaggcctctgcctcagtttctccatctgtaatttaggggaaggacagtgaggggaagtctaggctccctcctggcccagccttgggcccatgtgtggggcggggcaggcatgttatcatgtgcttcaggtcacctccgtggggagaacatgtcctcttgggacaggcttgactttgctttgttccttggtcggcaggtgacagtattagatcttacctatccggagttcagggtcccccaggcccacctggtcccccaggacctgtcaccaccatcacaggcgagactttcgactactcagagctggcaagccacgttgtgagctacttacggagtaagcccttccccacgccctgcacctggcaccttcctcctgtgggtctgcttttgctcccagagcctcatctcctcgtttgctgtttgctttgcccttctctggaacatgagttttaattccgaattcataataatcgggccactgggatacagtgtcaacaagggtctgtccagattcagggcggccacgctggagagacaccgagtgagccttccggcaattgactaatgtgttcctaattataggttcttcccacctgtgcatgaaggttggcagcatctggcaggcattaggctaaagcatgttctcaaaaataaacttcctttcttacaaaaaaaaaaaaaatcccaacaacagtatttgactttgttatgctttcaaaatagcctcgtaatactccattcatccacttcccccaaagacaaacagctcggtgaccgggcctttcagattctggaatagtgagggtgttgcttcagtacctgctaagcaggtaacctgaggttttcttcccgacagcttcggggtacggtgtcagcttgttctcgtcctccatctcttctgaagacattctggctgtgctgcagcgtgagtcacctgtggggggatcgagggtgggactatctttgctttctcctggcctcactcgtcatgcaaaccttgtcctcgtctgagccttggaagggctgcaagagggaggcagagtcctttggacaaagagccacttactgctctgatctgcttgctgagtcagcaaaccggctggaaagggggcaggaaatgtcctcccaagcccccatgccagacaagctggcaggtgtccctttgggaacctggcagcttgctggtgtcccccctgaacaccgtggtcctgcggacccagaactcacaaatgtcacgcaggagccagtttgtgcaggggagcccaggctgtggctggatcatggctgcgacccccatggcctgggtgggtcctgctagtgcatcctctcctctccaggggatgacgtgcgtcagtacctacgtcagtacttgatgggccctcggggtccgccagggccaccaggagccagtggagatgggtccctcctgtctttggactatgcagagctgagtagtcgcattctcagctacatgtcgagtaagtgtctgcaggaggggtggttgggaagggcctgggatgactgggatgaggactcgcagcgtgaacttccctgtgattgccccactgacccccacctgccagactgcaccaaccccagcaatgagcagtgctcagagccgttcaaacctgtgagcctggagcaggtcaagaagcatggcaaggaaagccaaaacgggggtctcaggcactgtctcgtgtggagtctacatacaactctctctctctcacacacactcccatacacacacacccatactcacactcccatacacacacacactcacttccatacacacacacccatactcacactcccatacacccatacacacacatatacacacactcccatacacacacactcccatacacacacactcccatacacactcccatacacatactcccatacacacactcctatacacacacttccatactcagacacacccatacacactcacatatgcatacacacacgcattcccataaacacactcccatactcctgtactcacactcccatacactcccatacacacacactcatacacactcccatacacacgctcccatacactccagtactcacgcacactcccatacactcccatacgcacactccgatacactcccatacacacacacactcactcccatacacacatactcatacacacacacacacagaatgaagcacacaggcacactggacctgcttctccggccccgtgggcccctccgttcctcctttgggctcctcctctctgcctctcttcctgccaccatctcttttctttcttggaccccacttctgtccaaacctcttctgtatccgacctcctctctgacaggtgtttccatctgcctccccctgcctgatctgaatccatcacctccctaggttctgggatcagcattgggcttcctggtcccccggggccccctggcttgccgggaacctcctatgaggagctcctctccttgctgcgaggtaaggcccagcaggggacatctgtccaactggttggggaggaagcagagtcccttggcccaggccaggactgactccgtgccctcccttggtgtctcagggtctgaattcagaggcatcgttggacccccaggtcccccgggtccaccagggatcccaggcaatgtgtggtccagcatcagcgtggaggacctctcgtcttacttacatagtagggcactgtggagtgggatggggagggcaggggatgcagccgggccttgggggctcccatgggctttagcaagggcagtctaagtgctcctggagcctgtacagtgctgggtgcagggccctggagagcgccacatgtgctggcaaggggccttcagccgtggcagggacagaggtggggagagatggctttcccaggcgcagcccggtgtgtgattagggccgacctggggctccacctctcagtgactggagggctgagttgaatgaggctcagaattgggagtgggagagcctgacgggaacagccattcctggatgatgtcaggaaacagcaggctctggcctcctgcttttctctcctcccatcacccgggaggcccagcctcatcccctcctttcaggtggggcccacagcgccccgagcacaggctgggaattcagcttcctccgcagcactaccccgacctttctttctcttccttctgcccagctgccggcttgtcattcatcccaggccctccaggacctcctggtcccccagggcctcgagggcccccgggtgtctcaggagccctggcaacctatgcagctgaaaacagcgacagcttccggagcgagctgatcagctacctcacaagtaggtgccccgacggtgatgccccaccaggcaccccgcaggccttgcttttccctgtaagtggggcagggaggcacttaaagggacaggaaggccacacgagagccactggtggggtaagcccggtttccttccacaccaaaattctcccactcgggtacaagaaccctgaagttcacttctggtctctcaggggcattgacaccctgggagagactccctaactcccaagtctttctctccaccgagatctgagctcccactcatgcagcttctcaccctgcaggtcctgatgtgcgcagcttcattgttggccccccaggccctcctgggccgcagggaccccctggggacagccgcctcctgtccacggatgcctcccacagtcggggtagcagctcctcctcacacagctcatctgtcaggcggggcagctcctacagctcttccatgagcacaggaggaggtggtgcaggctccctgggtgcaggcggtgcctttggtgaagctgcaggagacaggggtccctatggcactgacatcggcccaggcggaggctatggggcagcagcagaaggcggcatgtatgctggcaatggcggactattgggagctgactttgctggagatctggattacaatgagctggctgtgagggtgtcagagagcatgcagcgtaagtggggacatttaggccttggtgctggggggaaggagcgtgggagcatctccagactggctttcttgtttgtggaacccccaggctgtgaagacagaatcaagcaggcaggggctggaggggacaggcagccccagcctagctctcagcctactcagcttaaggagccccagtcctgggacccgagctgtggggaacagagcacgctgggggctttgtactttgttttcccaacacctagctcgttctgggtcccagatgagtcatatgaccatgctggattttctgctggggccgagagaaggatgttggctaagagtcctttccccgcgcagcttaacggcacagttacgcagtcaacaagcttttgatgccggcccacagcaggaagagacctgtgccagtcacacagtggaatacaaaggaagttggagggcttcacccttgctgcggcttgatctagttcaactgctttgggagtttgacactcggagggcactgtgctcctgctgaagagggtactgggagatccctgcttcctgtgcccaagctctggtgttttacaggtcagggcctactgcaagggatggcctacactgtccagggcccaccaggccagcctgggccacaggggccacccggcatcagcaaggtcttctctgcctacagcaacgtgactgcggacctcatggacttcttccaaagtaagggcatccaactgctttcccagcacctgcctcactgcataggttcccacgggtctgctccagagacaccagtctcatgagaaatctccagttattaacatttgagatgctcaaaattagacaaattctataaattctgaactttgtttcctcttacacgtccaaactccatcactatctctctgtgttactctgaacaaatgacttgatgtcccaagcttccaggtgatcaagactctaaggccagtgtttccttgcttttgcagcttatggagccattcaaggaccccctgggcaaaaaggagagatgggcactccaggacccaaaggtaagtggtggcagagagccagtccctggatcctgtgttaacacccacctcgtactgaaaagcagctcctgtgctggtgccacaccggctacctgtgccctcagtccccagactcatgtattacttagttacgccccatttttccttccaggtgacaggggccctgctgggccaccaggtcatcctgggccacctggccctcgaggacacaagggagaaaaaggagacaaaggtaagtgttgactgctccacgttttgcatgttctggagggctgcaaggctgacgctcattagagaagcaggtgatttgttccagagcaagcctgagaaattcaggcaaatgccaattactccaggcagacactgccaaaagcagaatttgcataacaatcccattcacagtgaggaagaaaaggagagtgtcaaagcagggaggaaaaggagaaccaagctggtgttgaaatggggcaaacaagttaaataaatgtagtcttacaaaagatttcacctttgaagccatctttgcagtagtcacggttgccataattgcccaagccaagatccccacaggccacaagatatgttttaacttcctactgatcttctaactttcaggtgaccaagtctatgctgggcggagaaggagaagaagtattgctgtcaagccgtgagctagccatggcaggacagctcctggaccaggtctcataatgcatgtggcacttaggtccaaggtctccagagggtgaaagctggagtctgtcaatgtcctactgagacagcacagccaacctagctagcaacatttgttttagtctgaacaatatatacttatagaattcagtcaaagatacacaatctgaaacagcttcatggggtggactctaacagtagttgcaatgttttagaatgagacttacttctctgctatctagatctgaactccttggcttctttacttagttcaagccccagcctaggaaagccagttacataaaagttggctcaggagtcttagagctttacctaaatatgagcccagaaaacggaggatgggggtggggcgccttcctggaggtgacacttgatgggggtgtgttctggttactgttctaaggctgtgccatcagctccttcctcccctgttcattctgcattctctagtcagttggctaagaagtgactcttgcaactaaaaaaattaagaaattcacttcccctctaggaggtgatgatagggtttctaatggttatatgtatatcacattcccatttgcttagaaagtctgattgtagctatgattgtccgtaggcccatactagagttcatggatatgttatactgaaccaggccagagcaaacagaaaaagaaggttgagggcaatggacaaggaaggaataaagggagaagagggaaaacagaaaacctgatgctggggacacagcatcagctcaagacgtcaccctccattctgcactcagaaaatggcacttgggggactgggcgcagttggtctttaaccacttttcaatgtctaaaaacatttgtttgtggtctataagatgaaacatcatttcaatcgtaaaatttcccattaaagaagtttttttttctaatatcatgtttaatgtgattcgtctgaccaaagaaagattaaaaaatagtctgggttaattgggtctgattctaacactgtttattacaaacacaagaaaacaaaagtggttgtattttggggcatagcttctggtatttcattcaatccctgaggtcttcaaaggcaaatctttagatacctgcaactatgaactcaatctggggattttacaaagcacatgaaagttttccccaagcataagttatttgaaataaacatgcaacaaatgagcaagaagattacttgcaattaggtagtgctttatcctggggcaatggaattatgattgtagggcaagtaatatatggaatatagaaacttctattaaagaaaaatgtacaaatctcaaatgccccaaagaaatgcacagtaaaatcagacactccaattgagaagagactctacttagccactttgtgaatttgttacaagttgtgactctcaaattgctggataattaaaaatgggattaaattgcatctatttctacaccactactcttctaaaaagactttattttccataaggtctctgctgagtatctcatattatcccagaaaaaacactccacttgtttcctctatatcaaacaaccgctaacggcaacaaccagtcaagcactacacactctacgtggtctttttgcctcttttattatatcctgataattgcctgctatgaattaatgagaattttttaaaaataaggctgggcgcggtggctcatgcctgtaatcccagaatttcgggaggccgaggcgggcagattgcttaagcccaggagttcgagaccagcctgagcaacatggcaaaaccccatctctactaaaaatacaaaaaaattagccggcatggtggcgggcacctgtgatcccagctactcgggaggctgaggctgaagaatcacttgaacccaggaggtgaaggttgcagtgagctgagaacgtgccactgcactccagccggcaagactccatctcaaaaaataaaacaaaaataaaataaaaattagttcatacagcctccagatttcaaacaacttgagttttactaagcaaaactattgtgtataataaaggaattgtgctttttaaataattttttttcaaaagaattcattagttttacccaaaggctgaattttttactttttaattgtagcttttacacttattaaaagtaacttccaaaaaaaggggggaaaaagatgttttgaccctttaaaaaaaagtagctttaggggttcaagtattatatcccctttaatagtgatccttatcttgattaatcaagacataggagttttttccttgttactagatctacctaagatacccaaagtcttcatcaagttttagctcaagtaaaatagggtacaagtccaaacttactaccttctctggacaaaactcagaaagaggatgggcagatatgaggttatgtcctcagctggatggcaatggatgttagcctcttttgtttcattttttttttttaagtcaagaatgagctcaatagtgcacaacgctcccagattagaaaatgacactccatgcctccctccagctggacacgtgccgagtgatgctgcctagcgtctactgaatcttgcatgaacgttatcaatgacgaagagactatttttgcagaagtgaggtcatatgatttgtgaaatgcttggtgagaaaaatcatccatcccaagaggaaaagaaattaaaaacatacacatatatacataggctgatagaaatattttaagcacctcccaaaggaggggtttgcattctgaaagacaacccccagcaagttatcactaaaaactacatttgagtgtgtgtgtgtttgcgtgtatgctgtggactacacacagctaggaatactaactctggaagggtcagaagacctgcggggactgcaagttttacaatataactaggaccaacaactgcaaagtgttc

SEQ ID NO: 746 - DNA, 157227 bp, Homo sapiens
acataatccccatatgtcatgggagggacccagtgggaggtaattgaatcatgggggtggtttcccacatgctattctcatgatactgagtgagttctcatgagatctgatggttttacaaggggcttcccccttcgctcagcactcattctctctcctgctgccctgtgaagaggtgccttccaccatgattgtaagtttcctgaggcctccccagccatgcagaattgtgagtcaattaagcctcttttctttataaattacccagtctcaggtgattcttcatggcagtatgagaacagactaatacacttaacaaataatctctgaacattccctcaaaggctttgtaatatagaacaacaaatcaccacatattatttctgtgctatataataaagttctggacaaaggtgttcacagggaccatgctctttaatccttgacctagatcttaaagcacaggtagttgtagaagacagaccaagaaggaggtccctgtgggcagaggcaatagtaaatacgaaggtgtgaggtgaggaagtctgtatagtgaaccagagaaatcataaaaagcttgggatgacacaagagataaaacaaaaatgttgacttgagaccacactattctattccaagaaatgtgaaatcagttgtgaagttaaaggggaacttctggaagcttttaaacaaacaagtggcacgatgtgtgtgatgagtattactgacatttgccacctgtttcccactctttccaggcatgtggtagatttcatttccctgccccttacagaataaagcatgatcacgtgatccacttagccagtgaaatgtgagtagaagtagcctgtgtcacatctaggaggaaggttgaagggtagttttactttagcacattctcttccccttctgaggtgattagagaagatgttgagagggaatttccaggaggtccctgagtggctacaataaacagaggacccccaccccattcccacctccccatgtcccgtgatgaatatgtagtagaaatgataagaaaacttccataatgataagcctctggactggggggattgtttgtaactgcctctaaagtcacctgtccttgctagcataatttgcaattttaattggtaactctgataattacatagaagatgagtttcagagtagaaagcctgcaggacagaaaactagctagatagctaccataatccacagatgatagtgcaaggcaggagccacgaacttagagaagcagaagaggagtccagagatgcaatggcaagaaatgatatgagttggtaatcactcagattctaaaagcacccaagagcctaattgtttcagaggtatggaaaagagaaagttcttaaaaggaaaaggatggctaagaggggagatgaaatgaaacaagattaatgaagcagctgtgggcagcataagaggtgtatcttgtatctcattaaaagtagaggctcgtccctctacaatgaaggctagaggtagatcatgaacttaggaagaaaccagactaagtgtgaatgctgggtgaatttgacaagtcattcaacttcatttgtgctttcattaattcattcaggaaacagtaacagcctcactcattcattcaacatcagtaaagaacacaaaaatggcccctgccctaatggggcttacattgaaatgtagtgaagcagacacaactatttaaacagtgtgtagaaaacggacatgatactgtgaaaacaaattacataggacttgtcaaagacaataaccactcattttgtttaaaactcctacatggcatcaaagtaaaaaaatagagacctctgtgtcctttgaatgtacgaaaagaaccatcctcctttcctcttgctgttttacatttaaagaaccaactgtgaaaaatcaactctcttgacccaaagacaatttttttaacaatcaagccttccagttaattaacaccacctgtttgtttgacaggtgagcctgtcaaacattgttctaaatgtggcaggtggggaataggtggttaaatgtggcttttagataagcaacttctcagagttttaagtaccaggtgcatacgaatcacctggagatcttggtgaatgtgggatctgattcagtggatccagagtgagaccagagactctacatttccagcaagctcccagggaggccaatgctgctggtcccaagggatgccaaggcaaggttctagaggccttggaagtgtattaacctcaagggagttcataggctatgcttgcctccagccattttagtactgagctcagaagagcatctctaccacgtgccaccatttctcatcagggccacctattttcctttgtacaaaaaaaaaaaaagaatcaaatttcactatgtgactactgtgtgaagattctgcacaaagggtttttgctatctcattagattccaacaactccctgaggtgggtatggtgagtatgtctattttatagaaggaagactccagcccagagaggttaggtcacactagtaagtatggaaaggattcaaaactccagagtctactccagaggtcaagctctccagcattgcctctttcttgctgtatttacatcacaagtttctttccagctctgtatctgcaacagaaatgacttgcagttgactattacttcctgttccaaaattgataaaaccaagtctagtcctccaacaaaatgacttggtttcaggaaaaggcaattaaaattcaaattgaggaatcttctggaatttggcaaagagaagcatttaacattagcattgagatttttttgtttgtactttttaaaattaaatactgtcagtttgtgaaacataatcatgtgactctcagaactcttggacactgtcacctcatcaacagaacacctaccgtttcattccacaagagtggcagaagtttccagaagaaccttccctaccaatggaaagaagctactgcataccacacagcaacatctgcgatatggtcataaattccgcagtgttcccaagttgtaatgaagagtttaatatatgtgctttttattattctactaagaatatatcctaattcaacatgtgcgtgaaattttcacatgttcgtgaaaacaggagctctcatacttgattgtgcatgggaatgtacaggaaattttaaaacagctagagagtctgataaaattggcttggaatggtctgggtagcaacattgttttatcctcccaaagattctaatgcacaacgatagttgagaatcactggcataaaagacagaaagaagactgtaagattcatgctatagtcaaaataaaaagaatgggaggagtgtcttcattcactgttagggttttgcctacctgcatggctacaaagttctaagataccaatagatcccaaatttaactgcaagcaagtggttccctaaaatcagtgaccaactgcatgatcatacttggtgtctgaagccaattgcagcaaatatcagcaacactgttccaaagcaaagattcttaacctgaggatggaattcaggtgatctgtataggaaactcacataggaaaataagttgcatctttacttttagtaacatgtcacagaagttcaacatgtccttcccttatgagcacaggcaacagagcacagtagtattggcagttcttgataatttgcacccaccggtattttcatgtcacatttcagtttgggctattatctcaaaataccatttgcagacatcactactttgacattactgttgcttaatcggcctgctgttaaatcaagctatttaatgcaataatgatgatgcacctgtgttagttactatatcacgacttgaggacttccataattgcattccaataaaactgattctgatttaattgtattttatgcatttcacaacattcttctgagaaacagtctaattgctttaccagagccagtgtggtccgtagcacaggaaacggcgagagccggctggaggaccgtgccctggcacatttgcatcgcaggccacccccaggaagagcgcaccctgaccagagctgagtcttgttttgccctgcatttccgcagataagatttggcctgaaaagcagttcaactcagcggagaataagatgggctttctctttctcctcagctgcctctttctcttggcattttggagtgccccgactgccaggccggtaactcgagcctccaaattaatcaaaacacacagcacccagttaaagcccaggcagacaagcccaggagccagacgcgctctcctctggtgacccccgggccacaactccccagctgggcccgccaccaccccttgaatgccacgctccctccactgcccctcccaggcaggtgccggggccccgggacagcggttgccccacctatgggcgccttacctgtggggacgcccgcagcgccaggagctgccgccttgccaccccacgggacgcgcacctccagccccaatccacccgcgccccgctgcctcttcgcggcgctctcgcagccaagcccggcggccgcaagttggaggcgggctggaggcggggaacgcggaccgccgcgggcgcggggaacaagcggggcctcccgagtgcagacgcccggcgcgcctcccgcttaatctgggcagggccgctggccactccctccaccctgcgcagccacctccccaccgcgcagccacctccccaccgcacacccccaaacgccccacctccgaccgcaccccacttccccgcctgggcccccggaccttgggagcatcacctccttaaccccttaccctggatccgcgcccacctgcccctcaggcgcccagccctttctcgcctcctgggcacgatgcccgggtagaagggacactgcctggtaagttgggagggagggggtatgagggcgggacctgagccacgtcttccctcccttgaagccacaaccaaaaagcctgggtggggagggacgaaccgcgcgaccgagccctacaaaacccgccccggccgagtggcgaggcgagctttccagccgggctcccagagccgcgctgcgcaggagacgcggtggcctgagagcctgagggtccccggactcgcccaggctctgagcgcgcgcccaccatgagcgcccggaccgcccccaggccgcaggtgctcctgctgccgctcctgctggtgctcctggcggcggcgcccgcagccagcaaggtgagtgggggctgcgcgacccccacccccgcacttccatccctcctccacgcgtccgggggacgcgctggccccacccgcagcggcgcggtagtggagcggctgccgggctagtggcgaggctgagggcttcacgcaggtcccgggacaggcagcgagcggaagggagcaagcggggatgccccggaacaggtggaatgcgcggggctgggggaagaggcgaggagggggcttgtccagtgcctaggagtcagggatggcggggacaggcctccagaggtcagtaaattaaaaaatagacacatagataatcgccagggatgatacgtgagaacaccggatgtggagatgcacggtgtcacgctggtgaatcaaatcaagcagcttggcccagcgcacagagggctggcaggagacacctgcagggagtcccagccgccacttcctagctgggacgtcacactaaaccctgacctctctggggctcagtttcttccttgcaaaacttgccctccagttttcctttgctattgttgggaaaagcaaatgctatcactgaaaaattaagagcaccttagaaatcgaactcaggttagaatcatttaagcaatctgacactttgatttgatttttgacttggaatttgagtgaaactggatttatttaaatccatcccatatttcttattctttgccattaaatagaaattgattgtcctcaaaacgattgtgcctcctagagttgactcacttgattttaccttgtgaaagtaaactttaacttttcagatacttgttatttttacactttaaaaagttgatttgggtgataacgtggcataggaaatttcatttccaaggatgagcagatgtttttacaaatgttatcattgagattatgattggaaattaacggtcacataaatatttatatatgttacatgaaaagaattttagaacctatggtcacatataggttctatatgtttttcctatttaaattaaatgaagacattgcagacattataggtgaaactaaagccctctctgacaccccccatacctctccccatttccttgtcttccaagaggtgtccactttcaccactttcatatttcatgtagttttccaaacattgtccatgaatttacacacacacatatgaacccacaaacatatatgtatgtttttgttggccttttaacataaatgatactgtgctgtattcctttgcaacctgtagaccagtccatgtcagtatttaagatcctcctgtttttctttttgctttgttgcacagtatttcacaatatgccaaagttaattgaaccatttccctatcagtttacatttagattattcactgtttcacattctaaaggacatttgtaatctatgtaatctgtttgtgtagctggttctaacaaaaatgcactttgcatacattaggaattcccagaccaggtatttaaatgctactaggcatgatagataaaactcagtggggattatctaccagctttaaccaggacaaataaatccaaaaaagcaaaatcctaaaggaaatgtgtgttgtggggaagcctggagaagagatccagagcagggtttgcacatgtttctgaatttagaagaacaggaatgagattgggaaggggtggaagaattgtacttatgtgaggatcagcctgaaaaagtaatgcttggggaccatgcaaactctagttataccattttcaattctgttgttacattcctttgttatttttacatgtaaacttttctgttttgagtttggccaaatcttggtgacttcttgctgaaattaatccatttgtattgtttttctcatcacttgaagtaagtctttcattaacaagttttcaggattatcatttccagtgtacctgctgggttagagagaaaatatgccagtaaaataatgaaatgtgccttcatcttgtagaaaaaggaatcacaacgttcactgataatcgggcaatgtgcaccaacatggctcccttcacagagaaactctgctgttgggcaaggctgttgaccactctgagcctcagttttctcatgtgtaaaatgagagttgaaaccccagtggggccagcaggtgaagtaaggagtaaggcaatggggtaagagagactcttcagaacctagttgttagcatgctagaattcaagcccaattgtgccagcatcacttcaagagagaagttgggaatccagtttttattagaaacttctcaaattctaaatattagcaactaagccaaaactttacaaaaacatagtgtgggccaaacaatgtataagtgagagctaaatgtaactttggagccattatattttattatttttgttctactccagttaaggatgtgtttcgctccaatttattcagttttactttagcatttctcaaaacagggaaatagcagcggtgttgactctacatgctaagtttgtttagacggggtggaactgtccacccacacaatttggactgatgtgccgagaattaaatacctctgctactttgcacaggcatccagttccaggctggctgcccagcgcatccccaggttttatagctgtcagggcccagctcacccacttgaaatagggcggcaccttgttgttgtctcaggcaatagacctgggagtggaggtatagaaagccccttctttgatttctggataaggtgatgttcacacattaagatatcatggtttatccttcttcttgccttagcattccagacagggcagcaatatgagaagcaaatgtcaaaacgtgaaaaacacctacatttggggaggatgccttctcaccgggcttcattttcaaatttaagcactttcagttaaattagaaaacaaaaagtaatggaacagacaccaacttatctatccctgagattaagcaagtattaatatactttgacttgtttgttctcagatttctacctttaggaaaaaaaaaatctgaatacagaaagtcatacacacattctttactccctcttccatcccaaaaagtttatgtatgtaatttccctgcacagttttgtgtgtgtgtgtctgttctccgtaaaaaataagtattattgttttgtggtctttcatatgtgataaatagtttcacattacacgtatctattggagcttgctttttatcactccatattatgtttttggattttatccatgttggtacatatagatatgatgtatttgtagtaatagctgctgcatagtatctagttatataaagtatgattcatttttccatctccctaaacaaagtaagcttgtctttatattttcattttataaagttgcaatgcatattttggtatatgcaccactgtgacaactagaatttgaattcctaagtggttcgtagagaaaacaaatttaaatatattaggaattgacaagttcatctgcaaaagggttgtaccaacaatgtaccagagtgcctgtttccctatgtctttggcaaagcttggtgtgcttagatgttaatggtgtgaaatgagatcttgttttgaccagtgagtttgtaaacttttttcttttttaattggccctttatatttccttcagtgtgaactgcatagtgcaactttctgtctgtttatctattgtgaactttgcctttttgttgctaattaattagaagttatttatatatttggatacaaaacttttgtcattaaagtgtatagcaaatattttattccaatctttggtttatctttgagttattggtgccttaatgtataatactgttttcactataatctcaaactgattttgttttgacattttgtcttttgtaccttgtcaaaatttttttttcctttcctgggattataggaatgttctcctacatttaaaaaaagtttcatagtttagctcttttacagttagatctcttaatcctgtaattattttctgaattatgagatctacttttatctttttccatgtagatgacaaatcgtcccaacattttcaatcaaatagtatattctttccttcttttttttcttttttttattttattattattatactttaagttttagggtacatgtgcacaatgtgcaggttagttacatatgtatacatgtgccatgctggtgtgctgcacccattaactcgtcatttagcattaggtatatctcctaaagctatccctcccgcctccccccaccccacaacagtccccagagtgtgatgttccccttcctgtgtccatgtgttctcattgttcagttcccacctatgagtgagaatatgcggtgtttggttttttgttcttgcgatagtttactgagaatgatgatttccagtttcatccatgtccctacaaaggacatgaactcgtcattttttatggctgcatagtattccatggtgtatatgtgccacattttcttaatccagtctatcgttgttggatatttgggttggttccaagtctttgctattgtgaatagtgccgcaataaacatacgtgtgcatgtgtctttatagcagcatgattcataatcctttgggtatatacccagtaatgggatggctgggtcaaatggtatttctagttctagatccctgaggaatcgccacactgacttccacaatggttgaactagtttacagtcccaccaacagtgtaaaagtgttcctatttctccacatcctctccagcacctgttgtttcctgactttttaatgattgccattctaactggtgagagatggtatctcattgtggttttgattcgcatttctatgatagccagtgatggtgagcattttttcatgtgttttttggctgcaaaaatgtcttcttttgagaagtgtctgttcatgtcctttgcccactttttgatggggttgtttgtttttttcttataaatttgtttgagttcattgtagattctaatgttttgcagtgttatagctgcaaacgtgtataccattcatatgtggatctatttgtaaactctctattccattggtccaatatttttttgtccctccaccaataccacactgttttgatcactatgtttatattaaatctatgtctggtaggacaagtagaagatagaacagttatccctattattattattctttaaatttatgacaggtattctttcctctttgctcttctggttgaattttagcatctgcatgtcaaaggtccatcaaagatttctgtgggatgttaattggtattgcactgaacatataggtaggttaactgcttgttgttgaagtataaacacatggatggtacacagaaatgctactgatttttaatttttgatgttgggtcaagcaatattattgaattttcttatttaacagtttgtagatactcttagatttttttatgtaactagtcacattgtcagtgaatagtttttcttcctttctaatctttatgccttttttcccttgtattactgtgctgaccagctgtattaatctgttttcctgctactgataatgacatacccaagactcgataatttatgaagaaaaagaggtttaatggactcacagttctacgtggctggggaggcctcacaatcatggcaaaagagcaagggacatcttacatggtggcaggcaagagggaaagagacccaaatgaaaggggaaaccccttataaaacatcagatctcatgagccttattcagtaccacaagaaaccacccccatgattcaactatctcccaccgagtccctcccacaacacataggaattatgggagctacaattcaagatgagatttgggtggggacacagccaaaccatatcaccagcacttcagggcaatgctaaataaaagcagtaatagtatgtatttttgtctcattactgaagttaaaggaaatattttaacattttattaagtatgattttttctgtagagttttaataattgtcctcatcagtttagggagtttcactccctaatattactgtcattgttctacttaatgactggatgttaatgttatcatttatttagtctgtatctattttaagaaaatcatacattctttagtcagtcacggtagcaaattaatttatttttaaactatttaaccatccttgtattgctgtgggataaagtctagttaaaatggctcttcttaaaacatatactattattaaatgtggcactaatatggaaaagtgaattaacaaatgtagcatttaatggcttattagctgaatacccacataaagaccattcgggtcaaggaacagcacactgctagcacccagaagtcacccttgcatctgtctcagccacaatcccctttcttttccctgaaagaaactagaatctgacttctaataatcatttccttgctttttaaaatggatttatcatctaaatacttattccaagtgctgtattttggttctgcctgttctgaactttatgtatgtagattcacacgctttgagatagtgtatgtaaattcctagtgccatgctcagggtataaatgtagctaacacaggagtgggcacctgtgagagtccacctaagacatatacactgtggccatatgtttgctgacacctctaaacaggaaagttgaggtgttaaataactgacgtgtatgatggaacaaaatccacatgtgcgttgttttctggaatgaagctgttggcgtctgtcttagtctgcttgggctgccatcacaaaataccatagactgagtggcttaaacaggcacttacttctcacagttctggaggctggaaagtccaagatcagggtgccaaattgttcctggtggtgaatccgtgtgggtctgcagaaacctcagttcttgcctcctctgaagaaagaattcaactgaggggcagaaggctgaaggagagaccaaggcaagttttagagcaggagtgaaattttatgagaaagctttagagcaggaatgaaaggaaggaaagtacacttggaagagggccaagcgggcaacttgaaaggcaagtgcctcgtttcacctttaacttagggtttttatacgttggcatacttctggggtctagggtcccttctctcctgattcttcccttggggtgggctgtccgcatgcgcagtggcctgccggcgcttgagaggggagcatgcgcagtgtgttcactggagttgtatacgtgttcacttgagacattcttcctttacacttggaatgtccctggaaggtcatataccagttaaactccgccattttgcctcttaatgtgcatgcttgagcccactctcccaactcctgagatcttatcgggaagatgctgctcaccaccttcaggtgttttcatttcttgggagactgcctttccctggcactggctgcaaccaattattactttacaaagactgttcaataaccgcctgaccatcatatgatagtggcctgacattcctgatgaggcgggggccctctcctgccctgctcatgcctgactagctacctacagtaacaaaatgtctgggtgctggtaagggccctctttctggcttgcagactgctgacctctcattatatcctcacaaggtagttcggcgggggtggttggggagaaagacagagagagagctactgctctggtttcttcttctccttctccttcttcttcgtctttgtcatcttctttctcttcctcttcttcttcatcatcttcttctttcttcgtcttcttcttttttttttttttttttttttttagatggagtcttgctctgttgcccaggctaaagtgcagtggcactatcttggttcactgcaacctctgcctcctggattcaagcaattctcctgcctcaccctttccagtagctgggacttcaggcataggccaccacacccggctaatttttgtatttttagtagagatggggtttcaccatgttggccaggctgatctcagactcctgacctcaagtgatccacctgcctctgcctcccaaagggctgggattacaggcgtgaggcacagtgcctggcccggtttcttctgataagggcacagatcccatcatgaagaccccaccctcgtgacctcatctaaacctaattaccttcagaggccccacttccaaagaccattaccctatgcttacagcttcaacctaggaatttagagggacagaaactttcagtccgtaacattctgcccctggtctcaagatgtattacaaacataaagaaggccttaaaactctttaactgaaaaaatgagttagagcaaagctactaaatgaagcaaaggaagctcggtgggtaaacttaacctgtgacaatcacagtttaaaatgttagttttaatatcatttctataataaaaattctcagtgttagacatcagtgggaattaggaactattaataaaaaccttttgatacaacagaaaactctttgctcttcctagcataaaggattagacagaagcttcactttatggtgacgaaataagtacaaatctggtaagaaagcaccttactccaggttccacgttgatctcccaaaatgtaagtccctggctctgcttttctcaaagtagccatgtcagcctttccattcttccaggtgttcctcatgtaaatgctaattagggcctccgatttcaggtccatttcctaaccgagactaaattaaattctattactgcgatagttttcaacatcacacacctacaaaacttcgggtaaacatctgtttccatgctatacaatagaaatataatgtgagccatgactacaagcctcatatgtcattttaaatttaatatcttctagtagccacattaaaaaatagagatggatgaaactaattttaatatgttttatttataccaatacatctgtaatattatcattttaatatgtaatcactattgaaaacattaatgagatattttacagactttttttcctattaagtcttcaaggtctggtgtgtattttgtacttgcttccagaacatctcaattcaaatgagccacattttcaagcatctatagccatatgtagccactgtcctggacagcatatgtctatgtaagtggcatccagaggagagtaggtgatacaatccatcatgtcattctgtggagagaatagattttgtctggttatttaccataagaaataaatacttgtctaaatgaaacactttaattgaaggcaaaaaatcaggctgagttgtgcataaatatctgtgcatctttacctccagaaaattaagatagttggccttggctgcaatgtttaaatctatacaaattagcattgtaatttgacaagcattgtaattttctaagttatgtacaggaaaaattgaaaacacatcacaaaacggaaaataattggaaaaaggaatggggcaagggaaatatattgaaaaccaacacaccacaccttgcctttcattttaaactagaaatcaaattatcactagcatccagacaggtaagaggtttagtattacattggccaagtaaattccaaaaaggtctctctttttcttgtctgaaaatggtgacaacatatttatagcagacagaagtgctccatatagtgcctggtacagaatgcatatccagcgtttttagtctagtgattattattattattattattattttgagatggagtcttgctctgtcacccaggttggagtgcagtggcgcaatctcggctcactgcaagctccacctcccaggttcaagtgatcctcctgcctcagcctcccgagtagctgggattacaggcacctgccactatgcccgcctaatttttgtatttttagaagagacggggtctcaccatgttggtcaggctggtcttgaactcctgacccgaagtgatccgctcaccttggcctcccaaagtgttgggattataggcgtgagcccctgcacccggcctagcgactattattttattatcattactattcaaggccagacgctaagatagaagacataggcgctgggctaggtgctgggactcattggtaaacaaaatagtctgaatccccagccatgatggagttagaaggcagcagcccagtgaagagacaaatgtgtaacatcagattgtggtgctgcaggagaggatggggtgtggtgatggagaaggagactttttaacatttggtagaggtggtcagggaagcagactgaggctggacatggtgacaaccttgtgaagcactgagggatgtggtccaggacagggcctctcagaagtggagagaggccacacactaccaattttaccacttctgggttgtcaaagaataaaaccaggccaggcacagtggctcagccctgtaatcccagcactttgggaggccaaggtgggcagatcacctgaggtcaggagttcgaaactagcctggccaaaatggtgacaccccatctctactaaaaatacaaaattagccgggcatggcagcaggcacctgtaaccctagctactcagaaggccagggcaggagaatcgcttgaacctgggaggcaaaagttgcagtgagctgagatcacgccattgcattctagcctaggtgacagagcaagactccatctcaaaaaatgaaataaaaaaaaccaagacaaacagagcttttgaaataaagaaataacatgaaattttaaaagctgagtttatatgctgatcacaaagggaattcctggccctgaaggaatatgctgagtattttgctacaggtgaggtgggggatgggacacagggagtcagggtaccacagaggaggtgggtctgtcgtggttatgctaattgaggattgagcattgctggataaatagggtgcaataagtccacaggcctctacatggctgtctatggtataattttaatgttcatgtttaacaaatcaaaattttagcaaaagagatataatgcagtgtttttatgctattcccaagacatttgcattagtaatgaaatgacagtgtggtttgggaatcagcccacatataaaatggtgtgatggaaacattcttctttcattcctgttgacatatctctgcccgtctttcttcagtctcattgggataggtgtgaattagccaaatgtggctgtgaagcccacagcaagattgccaagctaggcccaagagcccttatcccacctgacacaggaccagcacagagaaagatgaaacccagttaaggatctggaagaagtgaggagctcctcagatgaagaggaggggaagagaaccagtctagatcaacatggcaattgctcagtctgtcccgtttaattgatttggtgccattattttgataattatttatgtacatatggaaggttaaaaatccaccccacttctagtgcttagtacatacaatatcagactatcaaaaatgtttcttgaatcttcctagggtataaaaataaatatttccacataccagcgtcggtattgtatatgtatgatatgagtgtgtacatataaatttgcacacacgtatatttaaataatattttatattctcagcattttggtattaattattgcggtgagatcatgactttaaaactcgtaaccttcagagccatttgaaacacagccatataaaaatcttttaattttctagcggtagttttagggtaagttaggagttttccagtttaatctttaagatccatgtttgttaattagattgtctctccaaactggtttcttagagaagtgatcccagtgtttaaaaatgagttcaagtgtatttagaaactttgagagatttgtcgttatgtagacaaaacagtcaggtcattggatttttttcccaccgggatattttggttgttacatgaacttctcaaggaaaaaagttccacaagtgggaagttggcaaatctgcaatattctttctctgtatcaaatgacgaagtttgtctggagagacccaaggcaacaaggccagatatttattttctttgttgaaccagaatgataggataattttatgctgtttgcttatgctgatattgggaaagctaaagaacttgcatgctggctttaaaaaaaagttatatgtgctgtacaaaatttggaaaaagtctacaagtatgaaaagaaacataaaaattaaaactatttataatcatattacccaaagaggattactggtaacatgttagtctatttccttccagatttttttttctccactctgctttttcctcctaacaacagactggtgaaaatttttgtgtcatttatttttctttcctttttttttttttttttctccagatggagtcttgctctgtaacccaggctggagtgcagtggcgccatctaggcccactgcaagctccgcctcccaggttcacaccattctcctgcctcagcctcctgagtagctgggactacaggcgcctgccaccactcccggctaatttttttttttcgtatttttaatagagacagggtttgactgtgttagccaggatggtctcaatctcctgacctcatgatccgcccgcctcggcctcccaaagtgctgggattacaggcttaagccacctcacctggcctatttttctaaatataatttttaaatgtctatagagaactttattgtagattggtaccataagttatttaagtaatgccctcttattgaacattttgatcatttccaattatgtatttagaaatacggtagtcctcccttatctgctattttgctatttgaggttttagttacctgtggtcaatgggttccaaaatattcagtagaaaatttcagaaataaacgattcataagttttaaattgtgcaccgttctgagtagcatgatgaaatctcgcaccgtcctgctgtgtcccactggggcgtgaatcatccccttttccagcagatgcacactgtctatgctccctgcccacaagtcactgagtgccctctgggttatcagagtgactgtcacagtatcgcaatgcttgtgttcaaatagctcttactttacttagcaatggttccaaacacaagacttgtaatgttggccattgggaaatgccaaggaaaagccataaagtgcatcctttaagtgaaaaagtggaagctctcaacttaataaggaaaggaaaaaattgtatgctgagattgctgagatctacggtaagaacaaatcttctattcatgaaattgtgaagaaggaaaaagaaaatcgggccgggcatgctgactcacacctggaatctcagcactttgggaggccagggcaaaaagttcactgtattacccaggcctaggagttcaagatcagcctgggtaatacaatgtgacctctctctaccaaaaatttaaaaattagccgggcatggtggcatgtgcctgcagtctcagctactcaggaggctgaggtgggaggatcgcttgagccctgcagagtggaggctacagcgagctgacagcacaccacttcactccagcctgggcaacagagtgagatccatatcaaaaaaagaaaaagaaaagaaaaaagaaatgtgtgtatactatatatagagttccatactctccgacgtttattaaagtcattttttaaatgattatgtatgcagatgctttcttaacaaatgtctgatttagatgatgaggtaatgtcattattttattttattttttttgagacagagtcactccattgcccaggctggagtgtagtggtatcatattggctcactgcaacttctgcctcccaggttcaagcaattctcatgccttagcctcctgagtagctgggattacaggcacacatcaccacatccagctaatttttgtttttgttttttttttgtatttttagtagagacagggtttcaccatgttggccaggctagtgttgaactcccaacctcaggtgacacacccacctcagcctcccaaagtgctgggtgtcattcttgatttataggtgagagactgatccaatgatgttcatcaaattagtagagaaagtgggcttataattgggatttccggttataaggatatttggtagagccttttcctttaaaaaaataaatcatcattattattattttgagacagggcctcactctgaggcccaggctagagtacagtggtgcaatcttggctcactgcagcctcaacctcccaggctcaagcaatcctccctcctcaaccttccaagtagctgggactacagatgcatgccaccacacctggctaatttttgtattttttgtagactggggtttctctattttgcccaggctagtcttgaactcatgggctcaagtgataggccggcctcagcctcccaaagtgctgggtttacaggcatgagacatcgtgcctggccacagccctttccaaccaaaaacttcccagataattaaaaatgagtgtcagatgccactgtatttaccatttaagtaattaagtaatatatgagataaatttgagttttaaaatgatgaatgcttcatgagacttaaaaaaagcatcaattaattacttttatttactgaaatattacttgactctgcaatctaaaaatagtttaacctacttccatgttgcttcccttactcaactccttgaagaagttttcacgtctcatccatctttgtggttcgagctcttaatgtcacagttggtattttattagatatccaaactaaaaagtcaataaagaattagtagttctttaatcctttgacagaagaataaaacgttattttgggacaaaacattgaatgtttcattcattcattccacaaggcagcaaatacttttccatatcttactatgtgaggggtacagtgctacacgctgggaacaaagggagataaaactcatgtggtcccttctgtcctcatggagtatgcaatcaagtgatgggcttagatacgtgtgcagagaataatagtaaaattatgcatgttataacgaggtaaatatggaaaagcaaactttgagtggagttgagaggaggaataagattgataaatgtactgaacagtgaacttgcaggcattatattaagcaaatgcgtaagtgcaacggagccagaaagtattatagtaagatttcagtggcttgaaaacattgtttatctgcaaagtaaagtgcttaaaactgttggtaatgaactcagaaagcaacaagtagagttactgggcggtgcggtgcttttactgtcttctactttatgccccagatcaagcccttgtcagcgattagtagcagtgcttcaaggtttacagacacggactagattcttattttgccatcttacgcaaaagcagatcagcaatcctttccaaaaagcaataaaaactgagaacagggcagcctctgaaatcttatgagatgaggttccaactgattggaagcaagactgcatgtcccacgcaggtgccagtgctctctaattgctgcagaaaggcagaagaatgagatgtggatttattgagtactgtctgtgcctgggactgtgcccacgaaaccgttcagagcttctactcgctgtgacctgctcaggcctttcagagacggaacattcagagcccatgtgacctgaatgagcagcatccccacaccctacaagggcagtcatgcaggcaaggacatctgaggcaccctgggatctaaaagaggcagtgcccggcagcagtaagaacccttcatcatggtccagaagaaaggcactgttgtgacagttttgggcaagtcactaaaattccaaggccactcagattcaaattcagtttctgtttcctgaatcacaagatgtggcacataaaatcttcccctcctatctcctgaaacaatacaatcgcacattttacacacagtcaagcattccacaaatgccaagtattactgagacaggaatgagattcaatatcagaaaagcaatagtccaaatgttttttatactcatttaattctccttttatttcgtgacctagtatcaacttcctggaatgcattaaggagtttcttgtttttgaaaatattattcagtgcattctttgctgctggtattttctaataacattatttgaaacatcagcagaaatggcatcctcccttaggactatcccgattaaaaaatgagcagagtatttaccttacagcatcctgtgtaaatactgacgctaaaactcagccagtgatttcatcacttttgtgatgactttatcaggtacctcaatgaaaatacctgttaatagagaaaaaatacctggtatagagatatttctgggtaacatttaatattaataatttctgcctttcttgtctttaaaatagagaactctttgacatgtatctaaaagagaaggcatggaaccagctttggtacacagcctccctcaaattccattaatgcgtagttggctgcatcagggtcggcagtataaattcattttgtgcacatttaccgagcacttatgtgtgatgcactcttttacagaaactcttgaaatatccttcagaggatgaatccttgtgaagtttcaaaatgaagccactgcaactaattattagattgaacataactattctttatacacagatcttttttccctaactatacatgtaatgcatgtcatttgtgaatatttgagatatatagataaaagtaaaaacaaaactataaaacaaaaataactcctcatattagaacctggggataaccagtgagaatattttggtatatttgcataaaagtgagatcatatggcatatggtattacgtatccggcttttttgacattatattgtattttctcacatcagtaaatatcccttaaaaatgaatgcataatatttgatgatgtttatataccataatttaacttaaagtttttatgtttttaacaaggctatgatgatttttgcctacatatctgattttttaatgacggacatatagtagaattattaattagagtaatgggtataatttttttatactgcaagttctcctttccaaataatagacacagttttaatactaatgagcaaaaacataaataaaatcaccctaaattctatcttgtaaatataactagaattaacattttgatgtatatctatcttttcttatttaatctaaaatatgatttcccataaattgaagatctaatttttaaaaaatttcccccaaatagccaattttctcagcattacttctagaataacctactgctgattccctattgatttgtctcagctcttaccaaaaatgaaccataggaatatcttggccacaaataaatatggaatttacagttattttccttgtttattggccaggagtcagccaaatgtttgatagatttaaagcctccagccacaatcagctctccacttctgtgcccctccacccactcacgacagctatgaatctggaatgaggtgggttcagagacctcccattcatgaacaccataaaacatgcacattggctcaagatcattcactcattggaagagaattttgagtcagtgcatcaaagagcaatgtcctgtttttctagaccactctactcatcccatcccctcctgattctctcattcatttttaatgacctcccagcaggggatatttgtgaataaaatctattagatttttttctaggtttcttaaaggctgatctggcttaaaccatgcatcaaaattaaaactaaattgacttccttatatcaagttgagcagtagcttgataaacattatagtgcattataatctcagaaatagattatataatagctatattattatctcagaagcaaatataatggggaaaaaacagatttgtaataaaggccttaacacccacaattattggggaaaaatgttaacaattttaatcagcctctattgaaacagaatatcaatcaaacccctcttgagctatcacacatatatccaattcaagaattatttagttacacaaatcaacatttgcaatgtgtttaatatgttctgatataaaaccagaagactaataccaactactctaacatttactaacatactgtaaatgatttacttaggagtctgttttaataaagttcaccttcacaaagcagcatttagagaagcttcccctaagtcagacttgtttttacatgtgaaactgctatgctttttcaattggataaatcactgaattgatctaaatagagtgggctgatctatgttgttataagctctttttggcctctaattttcctgtttattcaaagtaaagaaagacagtactttttgtttctaaaatcagaatggtagttcctcactctataagcaaattgaaaatgattacgttcttcatggccaccatagcaaaccatgtcccataagagatgacctcccacactctcattctggggcctccaggagaaggaggaacaagctatgagttagaataaaactaagggatgattaattcccattttgaaaaataaattagaaaaaagaaatggtgctcagggatatgtaaaagtcccaaggagcagtgcagaccagaaccagagaccagaacaaggtggtggatggaaacgaggaaaatacaaatcagagggctcattggaattgcatttgacttaagactttaggtcagaccaggcattagggggcatacaggtagaagattgactcaaacttggtggagttaccaaacttggccaaaaggactccaaaccaagatgagatagtatgtccaaggtcaacaggcaggcttatggaagccatggacaccagaaaacagagtgacatggatatctgctactttcccctgacaattattctttcctacttctggtggtagcacatcaatttcacttgagagaactactctctcctccttgcttgtcagtcccttagtcaaaagattgggcacaggacctaagccaagccagtcaagtgccctctcccaggaatttaaatcttcaactgagagtgcaaggaggttattcatcctgacagcagcgccttgcaaaaactctccatcagttcttgtaccttgattctcacaacagccctggggctgtttttttctgagttgtgtttatttaacttttcttcaatttctatgtgctgcccccatgtcattccaacaaattcctttttgatcattgcattagcctaaatcacttctgttgcttgccacctcaaaaccctggcaagacatcaggaatccagacaatagtctggccagcagaactggtggttcagcaaccttctgcctcagccaagaagcctcttatatgaacaagtgaggagagaagtaccctcaggatcaacaaatgcagaccagcaagtgcacatgggtgaaccctggctaggaaactcatctggcagttacccaagatggacaagggaatgcggagactgagttgctggttaattattgcttatcagcaaactgtgaggcacttcaacttttgcagacatatgagtgtcagccctggtaaaattaagattgactcaatcagtctctaaaagaaatgataactattgaaatatcagtccttcttgggtgaccttgagtgccagcttggtttcagcttctgccttgctcattgatgcccctcaaaaagtgataagtcttatattttgtaccaagaaagatctggtcaatatttttgctatgctactacattttggtattcacttccaagtctttctttattaatatatccttttactttttggggatcacgtttccttttccaccagcaataacttaaaatattactttactgtttcaaattactcaaaatataaaatagtgaggtatcaagttaataaaacataacaaaatttgattatgcttaaagttcatacccgaaccagataaaccaaatagagcattttaaatatatagaaagactcatctttttttcattatgcgcattttagaaaaattctctctaaacttgtgtatacattcttgacccctcctttgcatggctgcctcactggccttttttttttttttttttttttttttttgagatggagtctcactctgtcgcccaggctggagtgcagtggtgtgaacttggctcactgcaagctccgcctcccaggttcatgccattctcctgtctcagcctcccgaatagctgggactacaggcgcccgccacacgcccagctaattttttgtatttttagtggagacggggtttcaccgtgttagccaggatggtctcaatcttctgacctcgtgatctgccctcctcggcctcccaaagtgctgggattacaagcgtgagccacagcgcccggccctcactggacttttggcattaggttgcaattcttttcttaggagtggattcagtcagccaaattgtaaaaagcagaaagcttctggccaagtgcaaggtctgatcaaacaaaggatgggtggtttgaggtgctttgacacagggcttttcgcagttaccccaagtgtgagtgcacagtgctgctagacaacatgccaagatcagataaaatctctatatggaccagttaccttttagctgtatgagaagaagggcaattgtacacgttgttcttgctcttgaatataggtaagctagtcattactactaaaaaagcaatgacaactgtaggtttaagatagtgtgttcatcttcatatataaagagaatatctatttaatttgttatatagtccactgattttcccctactcccatcaccatgtagctatttggtgtaattataatccccacagaagagagaaaacattccttgtcaatagggaagaagtaaaaagagaactgaaattcagaaggaaagccttaggctactggttttcaaacttcagtgtgcatgagagggagtgtatttgaaaatgcagatttcctggcaaaatccccagggattctggctcaataagtctatggtgtggcctggaaacctgcagttgtagcatctcagttcattctgatgcaaatggtccttggaactctcatgtgaaaacattgcctcagactgaggaagaagagggaacgcctgcctctctctgggcatcaccctcttggacctggaattctagacctgtgggctactggaagtgtccagataatgaaggagtcagcatctcctacagggaaggagaactcaacagcatgggagtggacagtaatttgttaactagaatagctggttgtgtgttagtcacgccttctgtttctaaagatttgccccccacccttggggtggtgtttggagaacgggagattatttgatttggtttgatttttcgtatactttcaggcttctatcacgccctcgatcacagcactgttgaataagataacgcgcattacataatgagaagtcaaagaaaccaagaaaataaaaatcaaacagctgttgtgatggtgtgataatgatgagtgtccaataatgaggcttatgatgacaccattgtcttggatgtcccactgggaattaaggggagactctgctgtcacccttgctgcacaaggccagtgttgacagtggcatcatcatctctgctctcccgaggccaggctagtgtggggaacagctaatagtgagagcagcacaaaaggagtttgaatttggttgacctgaaattagagttacaaagttcagccagtgtcctcttcacaaggaagttcttcccttaggccaaccttggaggatgctaagtttggttttattaagggggtaagtaggctccaccatctgtagatgttaataggattgggatgccatgagggagagtgtagatcatctgtttttgagggggtattctatcacattaaatgttcttgtttcaggacaggtgaagaatagaaaaggtttttgtcttagtctgtttaggttgctctactaaaacatcataaattgggtggcttataaataacagacatttatttctcacaattctggaggctgggaattgcaatatcaaggcactggcagatttggtgtctggtgagggcctgtttcctggttcatagataatactttctcattgtgtcctcacgtggtggaaggagtgagcaaattcccttgggactctttaataagggcactgatctgcttcctggaacattcagttagaaaagagttagttgaaacagctcctcttgatggtgttctcctcactcattagagattttccagatatttttagtacacatgatgaacagtaattcatttcttctatctttgtgtgcaggaagacacactgtctttaaaagtttaaagcaccctactcaggatactagagtaatttttccatcttcttcaggaatctggattccagcaacctttcagatattgacttaccaagttgctggactgggtcttctgcaaacagaaaattggagggaggatgagggtgaggatggggagacgctgataatcacacagttgtgactaagaagagaatggttgctccagggatgcctttgaatagaaattgactttgatggtgtgatcatggcaggggagaagtacagcagcagggatgagctgtgtatgatccaaatggctctacaagctggtgtgcacatatataactagatggggtttcttgcaggggaggaagcttggggcaaagacccaagaaattgagttttctgtaagtatacacccttaataattggataaataggaagttagttcttgaggcaggtctcatagataatggaagttattttaggaatatgcaggcttattgacctcattagcccattgtcccttccacagtgggaattatagcaatgcagtagaaattctaccattcctgctccagacaaccaacgcatgtatgtcctagctcatggtttctgcctactcagcttccacatcatggtttctattcattcatgtcttctccttccagagtgtctgccttctaccttctctctgtttatctcagcttccattcccactaccaagcatctaatgccccatatctccagagggaataagattggtccagctgatcacttcatgtttgtctcgatagagctgttgagtcagggcatatcacagcacagtagacttgcctgctttggtccagtcagctgtacccaagaatacagtttataacaaacaaacagcagcccccactgttttgtttttatgagggctagaagaacaacatccccgaactactcctttaaaaaaattaaaataaatgttagtaactccagatattttctgattgttctactccagtagaaaagtatgttaaacccaaatctagcaactcttctttagaggaatcctggcttcttcactacattgttaaaggactttgtaaaaaaaaaaatcacttttagtatcaatatcagaattctttttaagtatctggagttagaaagtggtaacatttggacattgtatccttttttctaggagagttttagtctgatccgtttataagcagatatttaacactgaaaaaggaccccaaatagtctttttaaagctcagcgagccattgtgagtcattggcttaacacaaaatacttttacataacccaggccaccgagagggatatccggtcaggtcagctatttttaaagcacttctcccccactccatctcacgtaacagagttacagcagtttgcttagaaaactggctcaggttctgtggctcatggaatcaaaacccaaatgaaatgtttttaacttgtttaaaactggaaccattttcacttaaatgtgctacactaccaaatcaataactttctgaattagacacacatatatgcaagcggaatataactttttcactgacatgtatatggtattatgtgttgggcttgccatatcatttcctaattcattaactcattcaacaaatatttataaggcacttactgtgtgctaggtgctgtgttatggctgaagacatgagactgagcatgatggacctgtcctcatagcttccagtatagtaagagttatggaccaagaaatgggcaattgtaatgtcacatgataggacagggatgcaatgacagagaatgcctgccgaaggagcatatagaagggtgtcagaaaacccttcccagagaaaatgatgtccacactgagactgaaatctagccaggaaggatgggaggagagactcttccatatacagaaaacagcccatgttggcttgggattctgtttgagcaccagagagaaggtgagtgtctggagggagagaggccaggggaggaaggaaaagggagctggggagaaaggcagggctccatcctgtagtgtcataagaaggagtttgaccttgatccttagaggaatggagagcacagaaaaatcttgagcagatcagaaacatcatgagatttgtgctttggaaagagaccctggttgtggtgtgggaaatggattagaggtgagcaagagaggaggtgggtagaacacagagaagcagaggcaaggtgtggtggtgatccccgtgagacaaggaggtggccaaaaggaacacagtgaccaagagggtggaaagaagcaagcagatctgtgagttttttggtctaatcaacgtgatgtggtgatgactgatagatgactctgcaccctcccaaatttagcatcaaagaactgctcacccagagacttgtgctacattcgtgttacaagttagtatcggtaaaaagcctgtccatttcactatattagtatgcatttcttttatcaagtaagacctaaataacccagagttctaatttgcaggcttgaaattgtaagtaacctaaaactctccattcaaaatagagtaaaccattttacatatatttatttgcttccataatttaaaaatttagaagtcatggaggtttcaggtgaggctggacctagcatttcaaagatatcatcaaagaccaggtttccttcaccccttgtcttcacatgatgtctgcttcatcctaagattgctttccctcgtggtctcagccatatacttctctgtgttattctgctatgaagacaagccatttctaccagtaattcttccccccaaatcaggaagtttcctttcccagaaatcatcagagaaaaactttggagttgcatgctctaacgccataacagtggctaggtagatggatgtgcttctaccaagagaaaggaagaatgtcaggtggaaaaaaaaagaaaaaaaagcaaacatcccctgcattcagcacattccctgatgcatcttagctgcagtcactattcataaatgagttgaaaaattcatcaaacaagaatacattgagatcaattgtcatattttaaatgcaaggcacatgcaggtccctcaagagctggaggtaactcaagagagtgatgcttctcccttactgccatcttggcgtgcctgctccatgatactatatttcctctgctggctctgcaaacatgccttgaattccatttcttgcagatcctgactcccttttaaaatatggacatgcatgatgcttctcacaacagtctgtacccattcctgaggaactaaaatggaaacacttctacagtctgaagcaaacacataaatagatatgttttatatgtcatctaggaatatatacatatcagtttattatttcggatcaaaatatgtaacagaagagggactttgtgtattctttgaggttgaaatgtatcactaattaaaacaaagtgtattaattattttctattataaaagtaataggtagtctgggcatcgtggctctaatcccagcactttggggaggccaaggcaggcagattgcttgagctcaggagtttgagagcagcctggccaacatggcgaaacctcgtctctacaaaaaattaaaaaattagtcaggcctggtggcacacacctgtagtcccagctactcagaaggctgatgtgggaggatcgcttgacaccaagaggtgaaggtttcagtgagccaagaccatgccactgcactccagactgggtaacagtaatatgtcataactaatgaaaatgtgcaaaattctgaaaagttaaaaggaaaaaagcaaatcatagtttactacttaaggacaatatcattaatgtttttagcatcttcttctagcacttctattatgtatagaattttttaaaaaatagatgcaaaggttattatatatgaaattttatgtcttttttctcttaaaaatagactacataaataatacgtatatggccatggaaacaatttttgacatttaaattttctcaaccactttgctctttttggatacttggggaataacaaaatttttattattataagtaatactgctatgatcatgccaatgacactctgcttgatttggaagtacattcctcgtacacattcccagaaatggattttttttttgtaaaggacgcaaaagtttaagactgttggcatatacaaaagacctattttctgaattcagactttaggcaaaaacaaaaaatttaagtgggtgagggggcaggaagaacaataaagaaagctaagaagtgttttgaaaagcagttcacaaaatcactctttaccagccacatacaaatgttgaatggctccatccacggtgcatttgtggagctcccctgttggccattccccgcatcaaggattcaaagaacctgccaaggggctgcaatgggagattacagtgactcagcaaatcaggatgatcagatttcaaagtcggccaaataactcatcttggagacagatgtagctgaagttttacattatggcctgcaagaaactttattctaataaaagacaactgtgtttacaactactgggcatatctcaggttaccttaaatgaaaatcattttcttatttttgtaattatgaaggctaaaaataaagatttttttcataattagtttctggaacgctaataataagaagaacttagaatattacagattctcttacaaaacacaaagaccttggaataaatttggcaatttcttcaacagcagtgcccttatcaaaaacagacacttgagaattgtggaaagggaaaaaaattatcgaaggaaagtcatatttccttaaatttctctgtgaatgtgtacagtgaatttcttcatctctaaagcaaatctttaaaaaggaagaatttgctctaaattcaagcattcatttttatctctctgtgctcaagtattcatttttatctctctttgcttttgacacagagtataaacggtaattataccatccagttgcaaaacgtcattgaaaaacagatggtaaattaatcccaaacaattattactccaggttctgactatcaattttgtcttgaacagcttgtctaaacctagttatagaattgtgaagaaggctaagtttgtgtctggttgttgtctttctcccctaccattttattaaatatttaatttcttcatgtgcacataatgctttgaaatgttagatgtggtttagcacacactatcatatttgacttgctcatttcattttcctcagaccctgaccagggcaggatgaaaaccaaccttttcatctctaccctcttttcatctcagctaattgtggaatcaaatgatgctgtatacataaatgtgaacccctgtcccacccttggtattggggctttgaaagtcttcaaaccccaccacaatggtggttgtatggagatcacttgacggtctcatgtgccccaagtcctcaatctctgcaagtgtcccttgggactttgctcagtgtgtgtttgtggtagttgttgtagtgaagggtggggagaaggttaggggtgtcctggagggcagggagagaggtttcattgtcccctggggagtgagtgtgaatcatgaatgaacaatccttgacgaatcgagtcaacccaaataagagtttggaacagtgtttctcaaactttctatagtgaagaaaattttgttttgtttttacatttccattatattgtgagccaatactttcttaaaatataagaataaaaaattaaaagaaaatgaaattaaaagatataaaatataagcccaaatattttaatcagcataaaatcactctatcaaatcactctaagctttctaaatgcttactttcaatttctatatttaccttgtcataggtaagaaactgagacccatgctttgagatgcactagtttagagaaactgaataatgcaattaaaaagtttcacctgataggactaagtgcatctcctccctacaaggatacatcttcattcccagtgctcatagaatatttataaaaatggaccataatttgaccacaaagaaacaatgaaggaattctacaaattagataaacttatggaactggatgaagaatcaaaatctgtttacaatgcaataaaatttaaaacaacgacagcaaaaggcctacctatgcattttaaatctttttcctaaataactcttagtttaaggaaggactcaagatcacaatggcaggatgtttaaataaatattcatgatgcaaagattagaaataaaatcctggctgggcacggcggctcacgcctgtaatcctagcacttggggaggccgaggtgggcggatcacaaggtcaggagttggagaccatcctggccaacatgatgaaaccccatctctactaaaaatacaaaaattagccaggcgtggttgtgcatgcctgtaatcccagctacttgggaggttgaggcaggagaatctcttgaaccagggagactgaagttgcagtgagccgagattgcaccagtgcactccagcctggtgacagagtgaggcaaaagaagaaaaaagaaagaaagaaggaaggagggagggagggagggaaggaaggaaggaaggaaggaaggaaggaaggaaggaaggaaggaaggaaggggagggagggagggaaggaaaggaaggaaggaaggggagagaaggagaggagaaggagaagggaaataaggagagagggagggaggaaggaaggaaggaaggggagagaaggagaggagaaggagaagggaaataaggagagagggagggaggaaggaaggaaggaaggaaggggagagaaggagaaggagaggagaaagagaagggaaggaaggagagaagaaggaaggaaggggagagaaagagaaggagaggagaaggagaagggaagtaaggagagagggagggaggaaagaaggaaggaaggaaggaagagtcctatgggttatgttccaaagagtcttctgaagaaaatgcatacctgttatatcatcagcatcccaataagaaacccacgacacactcacaattggataatttgagaagtttatttatagagacactgtttacaaaggtgaggttcaggtaaaccgtctgagatagttcaacagacaagttatttccaccactgctccctttcctggatctaagaaagagagtggtattgagttggccacaatcaatgagggctgaggggtgaggggctgtgagggagggaccaggtgctcaaggtagccctgcagggagggagccaggaaagtagaggccctgacctcgctctgctccttccctctctctgatcttttgccagaagcctgaaagctcaggacccccttgtgggagcccctttctgtggtcctcatggtcagccccttaagacaaggagcaggcctggaaggaggagtgaaagttatctggcattgctgtgagcacattcttaataaaataaagaagataaatgcagtatgcaatcaactcaaaaaattttcttaaattcaaatataaaaaattaaagggggaaattaagcaaaaacgtaaaaagaagtgaatacaaaagaaagtagaaatgctgtaaattcataaatattgtggctaaatgtttggaaaatacttgaaaatagaaaaatactagctcttctaatcaaagaaaaatagaaacaccactgatacacaaaatgagaatatagaagagacacatacaggcaaaagtaaaaataatttgcacctgccatgctaatgaatttgaaaacatgaatgaacttaaatgatttcctgttagagtatatattaccaaaattaagagatagataatctaaataaaccaataatcttggggaaaaaagaaaattttctattaattaccctttgaggaaattcctaccctaaaattgttataagtgaatttttttcattatgtccagaaatgactgttaggctattcaacagttcggtgcatagagaaaaatgatggggtcctaacattttgtttccatttttgttattttacaaatctttataaatagattttgaacttgagcaacattaggcagaaaaataaaatcataatcccaaatcacgtaaaatcccataatcccaaatcctgaaaaaaaaatcttgaaagaaaattagcaaaataacataataaaataaaaactcagtataatcatgcattgaataacaatgatgtttcaaacaaagacacaccccacatgtacaatggtggcccataagattataatgaagctgaaaactcctatagactagtgatgtatagcagtcccaatgccacagtgcaatgcattactcctgtttatggtaatgctagtgtaaacaaagctactgcactgccagttgtataaaagtctagcacgtgcagttatgtacgatacataatacttgataatgacgataaatattttactagtttgtttaccataatatactttttattattattttagagtctatgccacatatatatatatatgtgtgtgtgtgtgtgtgtgtgtgtgtgtatgtgtgtgtgtatgctgtagaacagcctcaggcaggtccttcaggagatatccagaagaagacatttttatcataggagatgacagctccatgaattattgccctaaagaccttccaatgcaacaagaggtggagatggaagacagtagtattgatgatcccgaccgtgtataggcctaggctaatgtgtgtgtttgtgtctgtattcttaacaaaaaaagcttaaaaagttaaacaataaataaataaacaatttaaaaatagaaaaaagcttatagaataaggataaagagaaagaaaatatttctgtacagctagctgtaccatgtgtttgtggtttaggctgttattacagaggaatcaagacgttttaaaaattaaaatttataaagtaaaaaagttatagtgggctcaggttaatttattattgaagggagaaaattagtttttataaatgtagggtagcctaaatgtacagtgtatataaagtctacaggagtgtacgatagtgtcctgggccttcacattcactcaccactcactcactgactcacccatagcaacttccagtcctgcaagcttcattcatggaaaatgccctatataggtgtactatgtttttatcttttttttttttttagacagagtcttgctctgtcgcccaggctggagtgcagtggtatgatctcggctcactgcaagctccgcctcccaggttcaagtgattctcctgcctcagcctcccgagtagctgggactacaggcaccggccaccatgcctggctaattttttgtatttttagtagagacagggtttcaccgtgatagccaggatggtctcgatctcctgacctcgtgatccgcccgcctcagcctcccaaagtgctgggattacaggcgtaagccactgcgcctggccgtttttatcttttatattgcatttttaccgtatattttctatgtttagatatacaaacacgattgcgttataattgcctacaatatacaggtttatagcctaggaatcacatctgttatgtacttttgatctgaaccaataaacctacatatggttgtaggtaatatgtaaaacacagttatctatttatgtgtttgtttcagactgcaggtatactatatagcctaagcgtatagtagtaggtcatgtggtttggatgtgtccccacccaaatctcatcttgaattgtgtagctcctcccataattcccacacgttgtgagagggacccagtgggaggcgattgaatcatggggggtaggtatttatcatggtgttctcatggtagtgagtgagtctcatgagatctgatggttttagaaaggggagtttccctacacaagctttcttttgcctgctgccatgtaagatgtgcctttcgccttccgccatgattgtgaggcctccccagccacctggaactgttggtccattaaaattaaacctctttttctttataaattacccagttttgggtacggtttttttgttttgttttgttttgtttgtttgtttttttgagatggagtctcgctctgtcgcccaggttggagtgccgtggcacaatctcagctcgctgcaacctccacctccctgggtttaagcaattctcctgcctcagcatcctaaatagctgggattacaggtgtgtaccatcgagtatgtccttatcagcagcctgaaaacagactaatacagtaggctatacatctaggtttgtataagtacactctatgatgtttgcacaatgacaaaattgtctgatgacacatttctcagaacatatcctcattttaagtaacacataactgtatacttaaaaaaaaatcaccaagaccaagtagtattattccagaaatgcaaagttgtttaacacttgtatttatagaattgaccatgtttatgtcaaaagagaaagacataatcttatccctaaggttaccagaaagcatttgggaaaacttccagtcatttctcacaacacatacacacctatcttggaaaagtggaaatggaaacaagaggataagcagagtagtcaatactctctgagcccactgttctgtgccaggcatggtggtgagggttcccccacacctccatgaggtaggttacaacaattatctcatttcactgacaaggaaatggcagagaggagaagtaatgtgtaaggtgtgtctcaaggttggtgagtggtagaactgggaagtcagcctggcagtctctctctagaactctggggtgacccctccaatatattgcttctcctgccttctctgtaagttgtggaaatcgtgtttatgcagaggtgaagaacagtcaaaatgccaaatcccttggaagtggccactgtttgactcttccctcttagagaggccccgcttgccagcttgttgctctaaggactgttgcatttttctcttggttggaatagatttaattcagttctcagctatctatgtgggtcatcttctgtaagtgatagtggaggcagctaacttcctgattgtaaccactcgtgccattgaaaccaaagactggagccaagatatttgtttctgtatcaggatttaatcaagcttggatttgtgaatggccatcagagtctgattagaaccaggttcttaacctcaaatgccgattttccaaattgtagcaatacttatttaaaaattcaaatatagtatatcatttatgaagaacataaaccattctgtcagtaaagctgtgtgtcaaatgaacaaaattaagttgaatatattgttataaataccttatgttatcacttcaaatgaagcatggttagacacgtttttagacaatcacattaaataatttctttattcatccagtctttttttaaaaatgtattcatctaacaaacactccacaccatgtactactactggagaaatgaaaatgaatgggaaaaaaattccctgacctcaaggaattcccatcatggtggtaggttttaaaagtttcaaagccaattgtctatctgttacagtgaggtaagttttaacaagttgagagagaagagcctgtagaaaaggaaaagatattccatatttatgaaaaatcctcttttatttatttaaattttgaccattaaaaatcattttgattttgtattgaaggcaatggggaagcagtatagggtttttagcagggaatcaacagagatttgtacttaagaagatccttttagaggcaggatgaagtgaaggatggctggaaagggaggtgaatgaattagaaatggcagcaactgagatggccctgcggagtcacaggaattagggcaagggacgtgggacttattttccagtgcagagtaacagctgttctcactcctaaggacagattaggagcaaactgaattgaggaatgaaaaaattcaggttaggctcagaggaacatattaccagtaagtcaaggttggtaagcatggcaaggggcctttgagtgagatgtttatcacaagaaaaattccactttcttccggaggatttacctgtgtaattgcaacctcagtagttttatagcagagttagtcatgaatttccttgtctatttcacccccattcctcccccaggattgggtcatttctatctctgatactacttggcaatctttacctctgaaaattcttgcccctggcatactatcatcctagaaaataagtattttagagatttaaatataaccaggtaatcaatgccctgttgtagttcacttcggctcattcagtctgcaactaagactggatcaaacagacctaagggatttgtctctaatctgaagcattccaaagagattgatttgaaattttcctaaagtccctgaaagtcttcagcttgagaaatgacccaaggtcaggattaatcccttactttagtgtttctgcattgtcgtccataacccacaggcatcggaatcacctaagatcttaaatattgagattcttgggcccagcccagactaaacattcatatctgtggccccagccccaattcagtgaatcagaatgaagacaggttgttgggagaagggcaagttcagaagggtttgtgcttttaacatgcatagttcttgtgcatataaaaatgtaaaaacaaacaaacaaacaaaaaactagtccgaaggatggatcgtgcctcccaatgttaataggaaggctgcagcaagagcttatctttatatatgttaactcataaattatattgcatgtttactcacagtctagaaggtaccacattctgtagacatgtatggtttgacctaatcacagaaagctagaagtaggaaaaaacatagagatagctttgtccaatctaagaaaactgaagaccagaaagactgaagcttttcccaggtgcacagctgaatgctagcagagcctgactgtcaccccaccatcttatgatatttctttttgtgatctcgatgtagatggaaaagaacaggaacgaagtttgtatctttacatagtgtgtatgtgtagatacaattcgaagaagggacttttttcctttaatctacactgattttccattagaacattcttgaacatccactgtattcacaaagtttttcctgggtgccagcaacccaaagcaccacactcttccccatcatcccacgtcatgctggttctacacagagtttcaactcttgattgttcaattattggctctcatctcacttctgttctgcataaggccagcccacacaaattttccattgtcccaagtacagccatagcacatagtcgatgcctaaagaatgcatatagatgtaatagttgccctattttagaaaacaaggaaggcgctggtgcatgtttctagtgtgcattggaggcaggactcaaaaatctgctcagactcacaaagccattcatagctgactcttcagcagtacaagcagggctaaaatgttttgggtctcaattgcaaattctagaaacttatgcacagactccaaaagcaagcatcttagttctctgtgatttgtacttgtaaacttgtttctgtcataagtaacatgatgttaatttacattaaagtttatggcttcatttacatgttcaattgcatgtacaattacaattgaacaattacatgttcaattacaatgaaatgttcaattacaaatgtcagatctcctcaactctctgcttatgttttgtttggttttgctttgcatttattccaaaatgttattatgaaaatgtttaaacattcaagaacatgggaagaagtgttcttcttaaattaagtttagattagaaattatattattcacatttaattttaatgtaataatgacatgccttaagtatctttaaaaagttttgtgttaacaaatacatttattcttattaggttatgttaccttaatgactctctttttacagctaatcagctcaagaagaaagaatcaagatagtaaaagctggacagtatttacttagcatctgtgtaaaaagcaagaggagattttctgtgagaaaaacggtcttatttacaagttcatgaatagttttgaaacttttccactaaggaggaaaaaaaaattcctctgttgttaaaatgttaacagtagtttaataggagttgacatagttaggtggaatcaaaaagcaaaatgcaaaagcccaacacatgttgggtagaaaaggcaaatttgtcacatcccaggcttacattgtatttgccactgtcgtctcagtcaaaggtttttgttaaggtctgaagacgcagaaagaagaatagtagcactgtatccgtttccagttgacgttagaagaatagtagcaatgtatccgtttccagttgaccttatttcaatagactgtgaaatccaaggtgtggggtcgtgtgtttagagaaacaagtagttcattctaaaaactgagaaatacctgatgtcactatagacaccaatcagaaactaccaaatccttttcaactgtaaaacagaaaggattctgaatggaacgagagatttaaaaccatctatgggactcaagcattgcaactgtatgtgtttctcctattgaaattaattactcttgtctattggaaatggatagccagattaatttttttctaagcacctcctgatcccaaatgaagcactggtctagtttgccattacttgttttgatgtatttttcaaacaccatggaatgatgtattattaactaaagtattaaatggaaactatagcacactttaaataccaacctttaaccattaacctgaatgctggtaaaaggacttcaaatgattttccagtacactaagccctgtttagcagtttgatttcacgattggttagcaacacaaaaatccaggtgcagaattcccttccagaatatattcttgctattttatactattaagtacgggttcattagaacttgatgttttgaatgtgttgtaacattgtagggtgtcaatattagagcacaccagttctagcttgcctgtggtatgcaattcacctgtattcggagagctatgtaatttacacttgtctgtattttccttgtggctgtccccatgccttttttcatgtttcattgttcttcctaacaaatgttaccatttccaactataggtgtttcttgaagccctaaataatcatgcctgtcttattttagtatccaaagtttactaactggagtgaactgataatgctggtatgcgggtatttttttaaaatatattaatactagccgggcgcggtggctctctcctgtaatcccagcactttgggaggccgaggcgggcggatcactaggtcaggagatcgagaccatcttggctaacacggtgaaaccccgtctctacaaaaaattagccgggcgcggtggcgggcacctgtagtcccagctactcgggaggctgaggcaggagaatggtgtgaacccgggaggcagagcttgcagtgagccgagatagcgccactgcagtccggcctgggagaaagtgcgagaatccgtctctaaaaaaaaaaaatatatatatatatatatatatatatcacatatatatacacatgtgtatatatataatatgtgtatatatacatatatgtgtatctatgtgtatatatacatatgtgtatatatacatatatgtgtatatatacatatgtgtatatatgtgtatatatgtgtatatatacatatatgtgtatatatgtgtatatatgtgtatatatacatatatgtgtatatatgtgtatatatacatatgtgtatatatgtgtatatatacatatatgtgtatatatgtgtatatatacatatatgtgtatatatgtgtatatatacatatatgtgtatatatgtgtatatatgtgtatatatacatatatgtgtatatatgtgtatatatacatatatgtgtatatatgtgtatatatacatatatgtgtatatatgtgtatatgtgtgtatatatacatatatgtgtatatacacacatatatgtgtatatatgtgtatatatacatatatgtatatatacatatatgtgtatatatgtgtatatatacatatatgtgtatatatgtgtatatatacatatatgtgtatacatacatatatgtgtatatatgtgtatatatacatatatgtgtatacatacatatatgtgtatatatgtgtatacatacatatatgtgtatacatacatatatgtgtgtatatgtgtatacatacatatatgtgtgtatatatgtgtatacatatgtgtgtatatgtgtatatatacatatatgtgtgtatatatgtgtatatatacatatatgtgtgtatatatgtgtatatatacatatatgtgtgtatatatgtgtatatatacatatatgtgtgtatatatgtgtatatatacatatatgtgtgtatatatgtgtatatatacatatatgtgtgtatatatgtgtatatatacatatatgtgtgtatatatgtgtatatatacatatatgtgtgtatatatgtgtatatatacatatatgtgtgtatatatgtgtatatatacatatatgtgtgtatatatatacactacagtagcaaagtcatttattatctcctagttttattttcagcaataatattccaaaaatatttgccacatatcaagcccattcccctaaaatataagcctcttaagcatgagaattttgtctaatgtcaattgctggattcccagctcccagaccagtaccagggcttaataaatattcattgactaacattcagcctagatagaacctgaggatgcagaagtggaaaaaatggtaagaacctttatagtatggtgctgacattaaatgaacagcactaatattaagtggcatcttaataattcgtagtagacctaaattacctggattcaactccaagaatccaagatccaccatttactagccgggtgactttaagaaaattacctagtctttctgtgcctcaattttctcatttgtaatatgcaataaggattaaataagttattagaaataatgtacttagaacaatgtctgtcacatgagcattcaataaatctaagctgctacttttagctgccacctggtactgcttctattgctcttttcttcatttccttctatttttttctctttctctatcttatgttctcactattttttcttctctttttaggcttcacacttatcctttactatagttctgccagtgactctcacaaacattgcttaaactttctgatgatgctcagggttagactccaccatatacgaagggacccgtgcaaatgatggctgaagcaggacagattgtctgggattctaaagacaggctaacagaattccttgttggcattttccttctgaatgcctctgtcttagcttaatcctattagccaacaattgcctagctggacacaagtaccaagtagccagggattttcaaattctatccccagatttgcctcagccacactttagctcttaagccgttcatgcgtagcttccatatttagtcagggaaacctaaaatattcctttactgtgtatctggatcctcagaacaaaacctgtaatgtcaagtgtgtttgtgaatatgtgtacacacataatcacaatcttccaaatgtttaatgtttccaatgtacatgactaatgactggtcatatgcgtgggcacatacataatacatgaagttgtgtgcaggtgcaacagcggtgatggaaaacaggattcgtatgtcttttccgttcatcttttacaatgggtaagtgaaaattatggcaacatttgattatattgcaaataaggagcagaagtttatttagagagaaatgtaaatgtggttactttacaaaaaaattagcatacttctatatgcaatcttgaaatcccaagagctgatatattcttttatttcatagtttaaaataatcttatctgtatattaaaaatagagactacaaaaaatgttatgaggttatgtgaggttatgcatatgttattcagctcattttggctaccctattatgtacacatatttcaaaatattaggttgtatatgaaatagtgtatatacgatattctatcaaataaaataaattaacttttgataaagatcaataataatatattgttccagattgccaatctctgcaaggtacaaacattgtgatatgtttataacataggagaatttgctttcaatgcattgagacatacaatgcttctatagtatctcatagttatagaatgaatattttatattagaaattatttttataattgtacatgatcccagacatgtaagcattttcttgataatatttatagctaaaattattattgattaaattaaaataacatggaaacaagtaaataacttcaaaaatatttatcaataatagtattacattccttcccacaatgcttaaaacccatatgactatacaacttaattcaacaaatatttttttttttgaaatcgactaagttcaaaatactctcttaaacatttcctgagctttaaatattattaagacagtctccactttcaaggaacttctggtttcttaggtataaaaagacaagggcccatgccactaaataaagcagcatgatgccaaatgtcgtaagagcagtgtcttggcaagttgatgcattgtatctggggagatcaagagcagcttagctgaggctttagggcaatggttctcaccctggactctacaaggaaaatcatctgggaaacttgcaaaaatactgatgactggggttttgattcaacacgtctggggtgtagcctgggcattagggtttttaagagttcccccaggtgattttttttttcgagatggagtctcactctgttgcccaggctgaagtgcagtggtgcgatctcagctcactgcagcctccaccaagcaggttcaagcaactctcctccctcagcctgccaagtagctgggattacaggcacccgccaccacacccggctaatttttgtattcttagtagagacagggtttcaccatgttggccaggctggtctcaactcctgacctcaagtgatccacctgccttggtctcccgtagtgctgggattacaggcctgagccactgtgccccgccccctcaggtgattctaatgtgcaaggaggttctcggaaaaattgaaaaatcatcttagactttggttctgaagatcgaatgagattttgataggctcaggtgggaactgaggagagggaaggaaggacagcaggaagagagccagctgagcagcaaaaagtgagttagtgtgggaacactgaagagtaggaggaaatggctggatccttccaaatgcggcccgtgacctcataccaagaggtatgtaacacctgagaacttgtcagaaatgcagactctcaagccctgccccagacctaatgagtccgaatctgtgtcttaaaaagactcacaggtgatttgtatgcacgtggaggttggagaagcttgggcttgatcacagggtagcaataacgacgaaaatcactgacacacactcgtatgcaggtttacatgtcttagctaagcctcataccaacccataaggaagtattctttatcatcaccccattttctagatgaagaaattgaaactcaggtttgtttgctcatctagaaagtaatggaacagagattcaaacccagacccctaactgctacaaagcacttgcactgcatacttgcactgtgtcaccacttttgtggttaagaggaagcccaggagacaccctggaatggaagaggagggctctgatatgtactccagaggaaatcctgagtcctgggctaggaagagcaggtctgtgaatgagggggccctgtcctaccctccaagccagagcccagaaaaggcaaccctatccctttccactcgtcatctcttgcctttcattccaggtttctaaactaagagaacttatctgtgccttagaaaaagagttctaggaaaacaaccaagaaagttagtaaccccacagaaatggaatacctagtcaccaaattaaaaataaaacacacactaaaaaaatgcattttagtataacataaaaataaatatatcttccaaatatttatttcttcttcacttcttgtttatttccctacattctccctcctctctctcgtagccgaaacacaggttcagtggcccactgcttgcagagtccagttaacaagagtgtggtttggtataattaaagtgactttttattctaaacctagcttacgggaaggagtacagtacaggcttcccaccttaaggatactgcttcacttttggagcagaaagcaggtgctttaaagggcaggggggtttgcaggggcagaagtgactagttaggggttcacatacgcactttggtgccttatctaccgggcattggagctggtgtcttcatgggcagaaataggttgtaaatgtggccaaaagctctccaggtgagacagagtttcacagcaggcatactttggattgtaaattgagtgttatctctcaaagcagtcccctggtgggggagagttctgctctggagcttctaagcccatagttggataaacttgccctgtagggagtgtctggtgaaggggaggtaaaaggttataattgaaggggctaagtaggaagtggggaatagggagaaatggagaaaagagaagaaaaataattaaaaaatagtaatgcattctcctcttagaaaaattggagtattggttactctctccccccgcccccccacacacacgaaaccacctttgcaaaattataactgaggaaattatgacagtgaaataaatctaacttaaccaactctattttgcttctaacccttaagctgtccttgttcattcctgggcataggccgaactgactttgggaaggaattcagttcatggtttgactctgaaacaaaattgataacagccctttcccaaaaagacccccttcttgcctggggaccagtttgcctttgcaggactaacaaattagctacaagatgagaaattacagtttcagggtcatgcggcttctggcttcaagagtccgaacctccccaaattgctcctgggggtaacatcattattgtaaaacctaagatcagtgcttgagacattttgtagaccctgcactcaatggatcagctaaccccacccagacctgtaatctggtccaacccagttgtaccaatgcactcaggaacagaagacattaagaaaacctaactccgacccatgaagattccatctccaacctgaccagtcagctctccccacttcccaagcccctacccgccaaactatctttaaaaactctgatccccaaatgttcggggagactgagttgagtaatgatgaatattccgtctcctgcacagccggctctgcgtgaattactctttctccattgcagttcccctgtcttgataaatcagttctgtctaggcagcaagaaaggtgaacccattaggcggttggttacacacacacacacacacacacacacacacacacacacacatatatacagaaggaggtaagtacaaagttctagaaagaggagcaaaaaacaaagaaagaggagggagagaaacaaaattatgctgtgtgcaaatatttcaaatatgttaaaattttcctaaagttttcatggaatttttatcttaaatggcaagagaaagaaggaagaaagaacaggaagagaatacaagttgaggaattcccaagggaaagcagaaggaaagggaagcattacaaacaaacttttggaacctcattttttgcctaagccagatgtttctgaacgacacaaaacatgacttgagaaaaagtggctctgccaaccatggtcatacatcaccagcacaatgttaattcctgttccaaacaggggtacttgaaaggtcatcccaggataatcttggggattccctaagagtatgtggcctatgttgcgtccagctggttctagatggtccaattcagatgcatctgcttttccagtggaccatctagaacatcccttcttgctcccttcactccagccagactggcccagtggccttaggtcctcagcaggcctgaaccttttacttctggactttgcttgtcatcctccctgcctggtatatcttccccaacggattccttgttttgaatcctgctatctctgttaacgcagtactagccccatctcttctgtgaagcctctgtgtccgaatcttctgggaactccacctcctctgtgttagaacattaaaagatgggacctaggctgggcacagtgactcacacctgtaatcccagcactttgggaggctgaggtgggtagatcacctgaaatcaggagttcgagaccagcctggccaatatggtgaaaccccatctctactaaaaatacaaaaaaattagctgggtgtggtggtaggtgcctgtaattccagctactctggaggttgatgcaggagaatcacttgaacctgggaggcggaggttgcagtgagctgagatcgtgccattgcgctccagcctgggcaataagagcaaaactccatctcaaaaacaaacaaacaaacaaacaaaaaagatgggacctttactctgtcctgttcagtttctttttatatggatatgttctgaccaactctcaaatgcctgatggaatgaactgggtaattgggatgttaggcaagttgcttagctttcttgtctgtaaattgggaataataatacaacacacttataagattgtaaagatctaatgagttcctgtaagtaaagttcttaatacagtgccaggcatgtagtaaaagctatctgtgttatttatgagtttacctttgggacattgttgaaccaaaccttaactgatgttaaatattgttgcagaaacaggacagaggctccaaagcatctttgtaggtgcctttaacaagcattgcaaagctatcctacattataaagtacaatcatccatgaaatgatgtacatattatatatgcacagtgtaaagaatacaaaataggctgggcatggtggctcatacctgtaatcccagcactttgggatgccaacgcaggcagatcacctgaggtcagaagttcaagaccagcctggccaacatggtgaaaccccatctctactaaaaataaaaaattagccaagtgtggtggcacgcacctgtagtcccagctactcaggaggctgagacaggagaattgtttgaacctgggaggcggaggttgcagagagccgagaccgaaccactgcacaccagcctgggtgacagagtgagactccatctcaaaaagaaaaaaagaatgcaaaataaacacccaagtacacatgtacacagcacgcatgcaagcatgcacgcaggtgcacacatatgcgttaagataaagaacataagcagtataactccagtgtaatctaccacaactgcattcccttctcacagccaccccaccaccaaatgcaattcagacttttatgttacctattttcttatttttctttgccgtgtctccccataaatacttattcccaaacaaacaaaaatatatatacatatattagtttcacctgtttggggggaactctatataaatggaatcatactgcatgcatttgttgtgacttactttttcagtgtacgtgtgttcgttttcatcttccatgttagttataaagctgtagtttttttgtttttgtttttgttttcatttttgtttgagacagagtctcactctgtcgcccaggctggagtgcagtggtgcaatctcggctcactgcaacctccgcctcccaggttcaagcgattctcctgcctcagcctcctgagtagctgggactacaggcacatgccaccacacacttctattttttgtatttttagtagagactgggtttcaccatgttggccaggatggtcttgatctcttgacctcgtgatccgcccacctcggcctcccaaagtacagggattacaagtgtgtgccactgcacgcggccccataaagctgtagtttattcattttcactgctgtataacatcccatcctatgaatgtaacaaaatttgtttttccattctaccattggggcatgcatggggtttctcagtttttactatcacaaagctactgtgaacacgtttgcacatttgtcctgatgcaagtatgtcagggtttctccagggaatacaccagggtggaattgctgtaggtttggggatgcatatacatttatctttattagcaagtgctacattcatgctggaaatcgatttacaatcttacctggaggacataggcattctggtttctccttgccttcactaacatttggtgctgtcagacttgattttatttatttatttatttatttattgagacagagtcttgctctgttgcccaggctggagtgcagtggtgcaatctcggctcactgcaacctccacctcccaggttcaagcaattctcctgcctcagcctcccaagtagctgggattacaggggtgcgccaccacgcccacctaatttttgtatttttagtagagacggggtttcaccatgttgaccaggctggtcttgaactcctgacctcactgacctcaggtgatctgcctgccttggcctcccaaagtgctaggattataggtgtgagccaccgtgcccggccagacttgatttttgcgagtctggaacccacttttagcttttgccaaaatgatgtgtgtgaaggcatacctgagtttgggataaatgtgcagtttttctgaatactcatgacattgagcatgtgtttatatgtttatggattatttgtgtatcctcttctgaaaaatgactgcacgtatcttttctgttttttttgtttttttttgtctttttcttattgattcttgggcactaattctttgttatagatattgcaaatacatcacagtttgtgacctatgacatcttctgagaaacaaattcttaaattttaatatagtagaatttatccatcttttcctttatagtttatgtttttgcatctttttaatgatatctttccctaccccaaggtcataaagataccctctgaaacttccccctaaaggttttaaaattttggcttttccatttgagtccttagttcatttggcattgaacttttatgagttagagaaactttgcattgttttctatatgaatgaccaatgcactcagcctctttatctgtcctttccccaggaatctgtagtgccaggtctgccatatatgaggtttctacatatggaggacccacttctgggttctctatgctgttccattggtacatttgtccatctgtacaccaacaccacagtatcttaattactataattttatactataagtgttggaatctagaagggcaagctccctcctgggtccctcccattgcacttccaaatacattttagaagggtgctttacattttttatgactcttggacatccccagtgcacgttattgctcttgtcttacagcaaaaagaatattcttagctctcactctgaggccacagtgtagggtgaacacccatgatttaatgaaagcagttgagaggtttcaaagtcaagacacaacattgtctttcttgactaattggagactataaacctgcttaaagccaaactaaagacccttgcactaaacatggctcttgactcaataatagccttggccgttcataaacaaacctgttttggtcaaactttggtttgacatttaaaaccttgtaaacataatagctacttcctttcatcctgacccaacttggcttcctccaaggcaaatcaaggtcacagtgctattttagggtacagtgaaaattaagtttcttaggatgccttaaatagctgaagcgtaggctgaaacataaactggaattaattaaaagagaccacatgtataagagtgtggagatccagagagggtacttaaccagcccaaggtcacacagtctgaaaaactcaagtctctttactctctgttccaattttttctattctatactaggtgttggatgactttttttggagagtaaaagagtaaatatcttaggttttgtgggctaagaggcaaggtcctcaattattctagcaattgttcccctagaaagaccaatattccttttatatctaaaaatgtaaagccattattagctcaagggtcctgcaaaaacagtggggtggactagatttccctgtaggctgtagttttcaacccaagctctacaccatatgtaagagatacgtattcttgtttccgctttttagatgattaaaaacatacatataaatggccaggcgcggtggcttacgcctgtagtcccagcactttgggaggccgaggtaggcggatcacaaggtcaggagatcaagaccagcctggtcaacatggtgaaaccccgtctctaccaaaaatacaaaaattagccaggtatggtgacaagtgcccgtaaacccagctactcgggaggctgaggcaggagaatggcgtgaacccagaagacagaacttgcagtgagccaagatcacaccactgcacacaagcccgggcgacagagcaaaactctgtctcaaaaaaaaaaaaaaaaaagaaaaagaaaaagaaaaaacaccgtacatataaagaaaattacagatcaaatattacaatgcatattaggaatcagcagaggtgaaattgtgttcccagaaacaaactaatgctatatggtatgcatttgaggattagttctgaagatagctgaagtaaattggagtccacttcattttatcctccgcatattgaaaagtctgttatgcctcaggaacttcttggtactaaatcacaaaattaagaatgatcattgatacaaaaattctcagtaatttgataatatacaatgtctgtgtggagtctaaatatgcattctgaggaaacaaggttatttatatatattataccttttctccatttaaagattaaaagtcattgttgagttattcttagatagccttcaaacccaagtatattataactgtgagtatatcagacatgctattaatttttcctgtgttatatatagagaagccttctttgatgtgaattttgtcatttgtatattctctgatttaaacgtgttgtttgtatcttaaacatcacaaatgaagttgcattttcataacagcttagcatcataaccttttctatatttcttgctttaattccaaatcactatagagtgtgcccacagttgtatctttttacatgtttttattccttaggccagagcctattaaaacacttcacaggtcctattgctatctctgggcatgttactggctttccattcttcaaatacctgtccattgtgaattataggcactagctgtgtcaaatgaaaacaatttcaaagatttgtgtgtggagaacttgagaatcgctacctagtcctttgaaatgtggtcagctggatattgttagcctccttgtcatttattttgtgtcccatattttgaagagccttctcataaactcctagggcttgacagtctgggtgtctggtttaagaactttcttatcacattattacctaagggctgcaaagggcactacttaccaactccacaaaaatgaaaagtgtctctgaaaatatttgtcttcagactgactcattcttgaatgtctgaaacgtatactggatactttttggtttgtttactcggcttagaatgtgggattaaaatgagaaattaacatcaactaaacctaaaacttagacttttctagcagtgcatttttatttttcattttgtggataggtcaagagcctaccagtctcatcatcatcattttttttttaatgaaaagtcattatcgtttttccctcattatgaaataatgtacaaccaaaaattttaaagcaattcaaaaaagtataaagtcaaataggaaaatcaccatgatccccagagtaaccatttttaatcattctatgtatttacttccagaatttctgtgcatatataggttcttacaaaaatatcatataaatctgtctgatgtttttatgagttgctgtaatattccactgtattgatatggcacaaggtatataaccacctccgtatgtgcttgttgtttttgttttttgtttgtttgttttgtttttgcacagagtctcgctctgtcgcccaggctggagtgtggtggcatgatcttggctcactgcaaactctgcctcctgggttcaagcaattctcttgcctcagcctcccgagtagctgggattacaggtgcccaccaccatgccaaactaatttttgcatttttagtagagatggggtttcaccatgttggccaggctggtctcaaactcctgacctcaggtgatccacccgcctcggcctcccaaagtgttgggattacaggggtgagccactgcaccgggcctatgtgcttgttttatgtgcagatttatcctccctcagttttccctagcatcataggtgcaggcagtgtatcatagccttagctttcactaatagatgtttgtactactcttttgatattaaaaattttccttaggataaaacaaataagagggtgtttacatgctacaacatagatgaaccttgagttccttatgctaagtgaaagaagcaagtcacaaaaagacaaatactgcacgattccatttgtatttagtacctacagtagtcaaattcatagagacagaatacagagtcgtgtttggcagggactggagggaggagagaatgagagattgctgcttaataggtacaaagtttcagttttacaagataaaaagaattctggagattaattgtgcaacaatgtgaatgtacttaacaccaatgacctgcacactaaaaaatggttaagaaggtaaatttggcaaggtgcatccttccacaattaaattttttaaaatcaaaggatgtttaaaatatgattgtatatattttattgtaaaatgtactgactgggtatataaacgccaccctttcctgtcaatttcagttatctggaagacaaacaaaaaccaggacaatactacaaagattctgcacttcatttgtagttgaggccctcagaccttaccgcatctctttattctgaatttataagtaattcaatcgagctttagttactgatttcttaattagtagcatagattaaacaattagaaatacagaagaggtatcagagagctataggtaaggaagcagcagtagaaagaaaggaaggtagaaagcctaataccacaaaaagaatcttcctccaaaaaaaaagcatacttaacaatcaaaaccatagaccatcctgcaattaaatgatataaatgcaaataaatatctctatgtatgcaacagcatcactcaacaaatatttcttaagtatcagttatgtaccaagaatcccttagggcccaaaagtgttcacagtgacagcaatattgttcaggaaaggaggattatgtcactttcagtctgtttacaaggcaggagagcctgtcatacaatcacagatggtcagagtttgggttttaatggtaaacttcagttatctagaaattgcacttctatagactctcatgtttcctcaaatcctgtgtccaaatggtatcctgtttaataattgtatatgatttagtgactgtattggtctattctcacactgctgataaagatatacccaagactgggtactttataaagaaaaagaagtttaatggactcacagctccacatggctggggaggcctcacagtcatggcagatggtgaaaggcatgtcttacatggtggcagacaagagagaatgaggaccaactgaaaggggtttccccttatgaaaccatcagctctcatgagacttatccactaccatgagaacagtatgggagaaccaccccatgattcaattatctcccactgactctctcccacaacatgtgggaattatgggagctacaattcaagatgagatttgggtggggacacagccaaaccatatcagcgaccttacctatctacatggacttgtaccaccttgctccttttgtaagcaagcaatttgtaagcacattattcaccaagcagcagtatgtgcttgttaacaaagacatattttagccacaatgttaacctgactgtagtcctgttttatttgactgtttgtaccaatagccacagtttataggtttgggctatagaaaaagctgatattgagcataacaaaataatgcatgatgtaccatcactataggatggtgggtttattaaaataaaatatctctccctttctccagggaagccgtaaattgcaaaattatcaatatgccatctagcagtttatttatcatgtgaaaatttggaagtaaaatgtgtggtttcagcaactgaattcagtagtaatgacaactgttcaagaaaaatgtgctcatacagaattcttggttaccatcacctgtgatggggcctaaatatttttctttggagaaaaagtaatgaaatttggaggccttacagttaaacattattctggacattactggttttgcttgttctgttttacaaaatgcttctgcaaacaagacagtgctggcacaagggcagaagacactctcagcattgctttaagagtcagattcatccattaaaatacacattcaaactccatataactatatatagtcacatatatagttataactatatttaactatatataaaataactatatatatagctatatatatatatatatatatagttattttaaatttgccttaatagctaaacccctttttaaggttttccaaatgcgactgctcatttgaaaaaatgtcgtgtgggccgggcgcagtggctcacgcctgtaatcgcagcactttgggaggccgagacgggtggatcacgaggtcaggagatcaagaccatcctggctaacacggtgaaaccccgtctctactaaagatacaaaaaattagccgggcgtggtggtgggcgcctgtagtcccagctattcgggtggctgaggcaggagaatggcgtgaacccgggaggaggagcttgcagtgagtggagattgtgccactgcactccagcctgggtgagggagcaagactccgtctcaaaagaagaaaagaaaaaatgtcgtgtgaaaatactgcattttttattaggatatgataatgattccatctctgtcttaggaaaactaatttaaatgcacttttgttgttgtttctgtactcttccttccaaaactaacagtgaagcaagctatcaaggtgtctgctctgttgatccaacttgaacaatcaaactctactttagcaacaagaaaaacatatttttaatattaaaagaaaagtaaagcacatattaggaaaggtggaaatagaatcatcttggagacttataaaagatatctgatgcttaacgtttagaaatcttgtgacctgaatttcaattgttttgctttctaaattattttatatttgtttatttgtattttggttgtaaaaaaagcagaattaataaaaattcttttttcatatcctttcgtatttctacaaaacagatgttgccattatgtggaatttgtcatcttccaatatacaataaaatagcctaacatgaagtctctatcctcagtcccattatttctttttttttttagacagagtctcgctctgtcccccaggctggagtgcaatggcacaatcatggctcactgcaacctccacctccaaggttcaagcgattctcctgcctcggcctcccaagtagctgggattacaggcatgcaccaccatgcccagctaattttgtattttttttttaagtagatacggaggtttctccatgttggtcaggctggtcttgaactcccaaactcaggtgatctgccatcctcggcctcccaaagtgctgggattacaggcgtgagccaccatgccaggccccttggtcccattatttctatcccatctttgccttttccatttgctctgccacctggctcctgcactcacccttctcttagagccttttccacttatgacactatacactgtgccagcggggtgggttgtttttgcagagccaatcccaaagacttttgttaattcccccttggctttcttgtctatctgcttctaagattttatttacttggtattagtcatctggatgagaagaaaaactcagtcaatcatcaaaatgtctaaaatatccaaacgtttgtattcccagagatgtagcttacattttcttatttatttttgtatgacgtctcactccagctgtcattgtatttacatgcttatctccccatagtctgtttttagtgctgtgaagcactcttgtatccttgacattttccaagtttaatttttaatcttcttttcttgtttttaccacagttatatattttatatagttaaataatttacacctatgacttatgttatctgtctagtactctgtgatttactttttcatatagtcagtatgtattgagcatcttctgtttgcatttgtaaccccagtgctgtctagaggtatcctgtcctttgaggtttaaaactacatgaaattccttgaataccatctcgacctgtaggaagtccaaattctgccccaagatttcttcaccttccctggggcctgcattttcttggtagcttttccttctgattttctgtacttgctgaagatttgaatcttacccacatctcaatttccacaatgattcttccattaatggaccagagcttcttgtttaataaggcggttttatgtgtgtgtgtgtgtgtgtgtgtgtgtgtttcagagacaaagccttttttttttttttttttttttgagacagagtctcactgtcacccaggctggagtgcagtggtgcaatctcagctcacttcagcctctgcctcccaggttcacgtgattatcctgcctcagcctcccaagtagctgggattacaggtgcccgccaccacgcccagctaatttttgtaattttattagagaccgggtttctccatgttggccagggtggtctcaaactactgacctcaagtgatccacccgcctcggcctcccaaagtgctgggattgcaggcgtgagccactgtgcccaaccagagacagagtcttgctccactgcacaggctggagtgcagtggtggagccaactgcagcctccaactcctgggcttcagcaatcctcccacctcagcctctggaatagctggaactacaggcactcaccaccatccatggctaatttattttattttattttttgtagagacagagtctcactatgttgcataggctggtctcaaattcctggcctcaagtgatccctacctcagcctcccaaagtgctgggattacaggcatgagccaccatgcctggccataaggcagttttatatgacaaagtgtattgaagatttagagataacacaggaaatttcaactacattgataatgtgctatttctgagctgggtggtagctgcaggagtatttattacattattcttgatacctttccatatatatggagaatagtttaaaatttttatgtgtcagtggagagtcctataactcagaatgaataatgattttatcttcatgttatcagaaaagaagtcagatgctctgaggagctggatgcttttgtccaatgagttgcagacagacgttattgctggaattttttattaagaacatttcaaagtcatcacccctctttgttttaccttgtccagcacaaaggaattatcaacacctgtacatgtcatgaaattaccattgcagtggtctcatcttcttcttgacctctgtcactggttcccctgtaagacagtactcttgatcttgacatcaccaatcacagttcctctccaagcaccctccagtctttccatctttgtccctaggactccaaatcccataatccttccatctcactggtacccacaattcctttatccattgctttgtcactgtctctgtgctcctggagtctcctgtcttccctcattgatgacctttatttcatggtcaaggagccatcaggaccacttttttttttttcgcattcatcctcagctctcttgcttgatcaaatccatctggaaaaaccacaaatctgcttaaatcccactgtgtctatgcagcccagtcactgcttcccctccttctttcaagtctttattccaaaaatcacctcctcaggtgagccctttcgtgaccacattatctaaatgtttacaacccacccctgacatttcacttctttctttcctgcattaatttttcttggcaattataattagttaacgtgtgtattatacatatatatttatcttatctattgttttcttccccctgttagaacataagctaccgtgtcccctgtatctagaatagtgcctggtgcatagtacataataaatgttttttgaatgaatgaataaatgataccacttctagatttgaatataaatttgaagttggacattaggaaaaaaaaagtgaaaataagtgactgagggaaaatggctttgagggtgagaaagcgtcccatcctatcactgagcacagtagatcatttaactcagcatccttgtgtttaaaatgctccttaagccaggtgcagtggtgcacctaagtagcttgtagtcccacctacttaagaggctgagatgggaggattgcttgagcccaggagtttgagaccagcctggacaacatacggagacactgtctctaataataataataataataataataataataataataataatgataatgataataaaaagctccttaagcacccttgacatacaatacccaatcttgctcctgcagtccttcagccccctgcccctgagcttgctatctttcaagcttccttgcacattttccttttctggcactgtttctgttctgcctgattcatgttcattttatacgtagtgaaagttatacatttcttggcctgttctcaggtcaacacccacctgcaggctttgtccagagagtgtcctattatcatcaaatgggcccctgaagtcatgggaggcagctaagaggacactttcctctccccaacactgtgaacttgtcccccctcctaggaatgtagagatgagtaagatgtggcttgctatgagaaacttcgtggggtggtggagaaggcatgtaaacaaataattacagtgcaattaggtacgtgttataagtcagttatgcacaaaacaaatgagggagcaactaaccaccttgcgggttgagggaggtagtctttcaagacaggtaactttgaactgctctggaatcagcaaaactcagccaagcaaggtcagaggcagtgagaagtgggcatgtcaggccaaaaaaccatgtggaaaagcacaggaatatgaaagcaagcagagggtctcagcgggcaggaatcgcacctgcagccccatgggggccaatggcctctctgctggggatataggggacacagaatacagagagcctcccacaccatgcccaggagttcagactcagcactgatggccaggtctaaatacttttaatcaaccaagtgacatcatctaattcggggaatttatttaggattgatcattaatctcaactatcctatatttttacaaataacttctgttttatttcataaatatcaaagagattggtataaaagttctggggatgaatcttagttcctttttaatacttgatatgctaaggaagttctcagagtgtggtctggggaacccctgaaactaagcccctgcaagctgcttgttttaagtaccgattctaggcctcagacctgctcactgaggatgggatctcgaggggaaaagtatggttactaaagacttcaaataattcatatacatgaaaagttgagaaccactgtcctaaggttctgttggaatatcatgaaactatacagagatagttttcttaatcacaatctgatgtgaactgatactatcaaggaagtgtgttactcataacaaatggggaaaaatatcccaaacatttacatcatatactttagaaggcaaattcaggccaggcacagtggctcatgcctataatcccagcacttcgggaggctgaggtgggcggatcacctgaggtcaggagttcaagaccagcctgaccaacatggtgagacgcccccccaactctactaaaaatacaaaagaaaaattagccgggcatgattgtaatcccagctacttgggaaattgtgatgggagaatctcttgaacctggaaggtggaggttccagtgagccgagatcatgccactgcacgccaacctgggtgacagaatgagactctgtctcaaataaataaataaacaaataaataagcaaattctggtatcagattttctccttatcctttacagagagttatagtcatgatttatctcacttatatccagccccaatcaaagtattaattagatagtgtctattgtcctccacttgtggggagaagatgttttgcatagcagtgagcaactaagccaggaatgaattcagctctaagaagttactcttctccatagtgagctcctccaagacaaagcctttaggtgtgggctctgatactccaagcaggccagactgctgggcagaaaagtcaacatgaagcagagcctctgtgctctgaagtttgcacgcaatcgctccgaacgcagtcagcttatcggtccaagggaaaattagaagttccagattccaaataagatctggactgaccttggagtaatgactatgagacagatgaactttaaggcgttttacgatcttaatattctattacttataacaatggagagtgtagctctcccaccatcagccagtggaagcgcaggtgacctctggggtttccctgtgtctgcagataactgtcagctctaagctttcttcatcagatatctcaaccattgtctttaaaattttcctatgtttattctgactttgtttttttctaccaggaagtaaaaactaagctagtagttttccaaactgaaaaaacaaacaaacaaacaaaaaattacttaaaatgaatgctgctgggcatgatagctcatgcccgtaatcccagtactttgggaggccaaggcgggtggatcacctgaggtcaggagttcaagaccagcctgtccaacatggtgaaaccctgtctctactaaaaatataaaaaattagccaggtgaggtggcggcaggcgcctgtaatcccagctagtcaggaggctgaagcaggagaatcgcttgaacccgggaggcagaggttgcagtgagccgagatcatgccattgcactccagcctgggcaacaaaagtgaaactccatctcaaagaaaaaaaaaaaatgaatgattatagtttgagaaaacaattaataaattataggactttaaatttctatttttgagatgaactgtctttttattgctctgaatgaattttcttttttgttattaatttttatgtttagaaaaagtaatctagttttgttttgttcttgtttttgacagggtttcactctgtcgcccaggctggagtgctgtggcgcgattacagctcactgtggcctcaacctcctgggctccagcgatcctcccgcctcagcatcctgagtagctggaactacaggcttgcgccaccatgcctggctaattttttttatagagacagggtcccactatgttgccccggctggtctccaacccctgggctcaagtaatcctcccaccttggcctcccaaaatgctaggataacaggtgtgagccacctggcctaaactttggttttgtaaataacattttcaaagattttttttcaaatggtcctatgaatagacaaaccaggcacatgacctaagaagtcccatccgccttaatatgcgtctccacctgccagcctgcagctcgaattttccatcacttgtggcactggtggcagctttctgtcttttttgtttgttttaagaggtaatgttttctgaaaaatgtgtcagttcccaggcggatttttaaaaattaacccattagcatcatgtctctcgataagattagtttactttcacctctcagacagaagaccctgcagcagcaggtgacaaagcaaagagtgaccaacaagagagagtggaggtgggtgtggctaatttagtggttcccagtgcagggttgcaccaggccaaagcaagtgagaaaaataagaacgaggtagagatttttttttttaatcaagtaaaatgggagctttttatcaagttcccatgttaagggaacagctttttctttcttttttttttttttttttgttgagacagatctcaccctgtctcccagactggagtgtagtgatgtaacctctgcttactgcaacctccacctcccaggttgaagcgattctcttgccttagccacccgagtacctgggactataattacactccaccatgcccggctaacttttgtatttttagtagagacagggtttcaccctgttggccaggctggtcttgaactcctgacttcaagtaatccacccgcctcggcttcccaaagtgctgggattacagtcgtgagccaccatgcccagccaggaacatattttattctgtgggcattttacttgctttatggtatcttaatttttctctggaatatgaggacagtagatgagaggtctgctgtggtttggggggtgggtgattgtgttggtttgtgtttggaggtggccattgctcttatattgaaaaatataactaagacagccctctgtttgtcttccttttaagacacatttattttattgccctgtgaagttcaaaacatgaagaacttttggactagaggatctgctgggttcttccagtccccaaattgtattccctgtgtcccccaagctctggacagaagcacagtgggagaaggggaggcacatgggggtaggcggacagaaagaagagacaggtcccagtctgccattccaaggtagaagaccatctctcactggaactcacagctgatctcttctttaagtttctattctaatgttaggtttgtttttttttttttagatggagtcttgctctgttgcccaggctggagtacagtggtgcaatctttgcttactgtaaccttcacctactaggttcaagcaattctcctgcctcagccacccaggtagctgggattataggcactcaacatcatgccaaactaatttttgtatttttagtagagacggggtttcccccagttggccaggctggccttgaactcctgacctcaggtgatctacctgcctcggcctcccaaagtgctgagattataggcatgagccaccgcacctggcctctatcttaatttttaatgcaatttttatattgccatagaaaaaatataatgaagataatttgtaccaggaatcaccaagcttttcccataaagagccacgtagtaaatattttaggctttgcaagccaagaggcaaaatgaaggctactatgcagatacctatataacaagagagaaaataaatatccacaacatttgtattgatgaaatgcaaacttatggacattgagatttaaagtttatataattttcacattacaaaatgttatttctctcttaattttgtttcaaccatgaaaaatataaaaaccagtcttagctcataggccggatggaaacaggcagagggctggatttgtcctgcaagctgctgtctgccaagtcctgcattatacagctaatttcatgagctactatgttatgtttttcactgggattttacgtcccatcatgaggggcacagtgatagggtgagagggggagaaacatacccctcctcccccagtgccttgtggccagcagagcccgtcaataatgaaatacaggccgggcacgctggctcacgcctgtaatcccagcactttgggaggccgaggtgggtggatcacttgagctcaggagtttgagaccagcctggccaacatggtgaaaccccatctctactggagaatcatttgaacctgggaggcagaggttgcagtcagccaatattgcatcactgcactccagtctgggtgacagagcaagactccatctcaaaaaaaaaaagaagaagaagaaatgcaacactgcacctgagaatatgactgaccctgggtcagactgtctcacctgaattcagatccccactccccatgttccttactatccttagcctctcaaaatcctaggtttctcatctattagatggagcttataacagtacctcccttacagaattgttgtaagatataatgagataatatgagacagccagcactgaaagtgctcaaaacatactgagatcattacagtgctgatggaagttcatttcctctaccaccatcctgatcaagggatcccgtggagcctatttttcttacatgaatagtgaagttttctcagtctttctgcattcaaaaccttttagggggtaaaaagaaaagaaaaaaaaaggaacctggagttaatgattataggtatacttaccattctctgcattgcataagacgggcaaaattttcttaccatattatttattctcaaatgtaccagagagccctcactgcaccgtctttgtcagagttagtaatctgtatgcttgctgtcatccagaaaatcaaaaacgggtggctggcttacatgtctagactagtgatgtgtctctggacgggagttgagggataggaagtggcagctgcagtgagatttctttgatgtccaagggtggtgacagcagcttcagggcggggcaggcgggggcatcccgcaaagcagtccatgggtgtcattcttcttcactggagggcatggtgccagggcacatggttggttgcttaaggcagacacgggcagaggcggccctgcagaggacagctcgtggcgtctgtctggcacggtttggctatacttggtcagctcttcttttcacacacaaaaactttcccctcaggctattggctgggcagagggactggcagggtcagtaatcataatgcaaaatcaacagacctgctcagtagggtgttaaccagctgtgaacggtgccaactccccctgctattaaaccaggctgggctgggctgggctgcgggagagagattggagaaaggcagggcaggccacgtctgtttcaccagcatgcacaggaacgagcatgctggctgttgacagtagagagagaaatagtcaagattatttggaaattatgttctggtctattaataaaaatgcatgtgcatatttcctgatccttttaacgaacaataaaaatggatgtgtttaatgagatccttcatgagttttaaggataaaaagataattgtttacagtgctagggggatataaggaattgtgagacaccgttcccacctgcagtttagggaaagtgataaaccctcaactcaggagcacctaatgatccatgtcaagtcaatgagttagtaacagcctacagtaacagccctcagtgtatcctatgaactcttctaagggcttacctgtgctaaccaatctgaccccatttcacagatgtggaaaccgagacacctgagactgcctagactcacagaggtgaggtggcagagctgggatttagacccaggaagtacgtctctggaactggtgcccttcaccctgtaccactttgcctcataagagaaagcgatgtgcaggtgagacatgggtggcacacgggcactgcgagaattgagatcaagagaagagtgtgagacccaattgatccgcactcctggaaggcttgctgcctttgtgtaatatatttgatctggcacctttcttggataagcatcaagtaccattggggtctctaaccaatattttgttaaataaaacattgtaatgtgtctgtgctcttaggcaaatgatatttggttaatcaaccaatatagtcagtgtactctaataatactattaacaaatatgagttaattcatttattgtttgttagagatagataacagcagtctctcacccttgctcttagattcaacaccagttctttggcactggacaagggacttcaagaggaaatgtcagggaggaaggtggctagtgcagactgatggaagaaaggatcaaacaatagttgtggatgtcctttggcttggaatcttgaaaaggagaaaggggagtcccccagtgactgagtccttattgagtgcagggtaccaggcaggctagtgacagcatctcaactccttacaaaaacactgcaaggtacatcctagtatctcccttgacagatgggggaacctggaaggattaagaaatttcccggccgggcgcggtggctcacgcctgtaatcccagcactgtgggaggccaaggtgagtggatcacgaggtcaggagatcgagaccatcctggctaacagggtgacaccctgtgtctactaaaaaaaatacaaaaaattagctgggcgtggtggtgggcgcctatagtcccagctactcgggagactgaggcaggagaatggcgtgaactcgggaggtggagcttgcagtgagccgagaccgtgccactgcactccagcctgggcaacagagcaagactccatctcaaaaaaaaaaaaaaaagaaatttcccaaagctccagtttgtagctacaatgctgggagtagactcaacatagatgggtccgtatatattcagtaggtccatacatacatggcctgtgatttctggaattccaaacctttttggattctctacaatgaaagtttattttgcattttaagtaaggccgtaaaacagaaatgcaactgtgaaaaagaatgatttccacaagtttaactacttaatattcaaaagtgctaaaacatcatgtaatctcgggtcatttcctgatggcaggagggggtttaaaagccataatattattattaagagctttctgttcatgacaaatgattttgtattccattaagatatgaggaaactatggggtaatttattgctggaaggagaaaaatcataaaaatgttgcttaagaaatatccattagttatgcttccttaatagttagcctttggccatcctggttttttatgtgatttaacagttgaatagtaatgaatgggttattactattaaagtaaccatagtgtttcaaaaaaatgggtccaacaatgtagatggattaaaatcaatgagaataaaaatatggactctgtatcttttaaattaaataattcatttgaatttttgaattactgaaacatttgcaaattgaaaatgtatttaagaaaagacagcattagtgagagaaattaatatcatgagtcttgagctactgtcatcaccatccaaaagtattcaagtgcccctgtgctggggtctctgcaatatcatacaggcagggcttatttctacagcagcagctgaacagcagccagagagcagccctgactataattttgagttcacacaatcaggtgcagcatctacatgtcagcaacattgtcatgtgctctgaagtcctagtcagcttaattatgtagctgcacaagcaagccacaccttgccaatttaactgagaattaaagctggaattattttggagcagttccactaacgcaggcatagaaacacagctctagacctggctctggagcctcatctgcagggcagaccacatgcaagtagatgatatggcagacatgtataactggtacatgtctgccatatcatctgagatatgtacagtcaacaagagagaacagtcaagcctttcacaatggctcttcatttatctgactgctggatggaccagaattctccatacctctgtgcaatagcagctcagagctggaggcgtccccctagtataccagcacatgtctgctataccaatcagttttcttttattttttatattatttaaacattttttgtggccacatagtaggtatatctatttatggggtacatgagatgttttgatacaggcatgcaatatgaaataagcacatcatggagaatggggcatccatcccctcaagcatttatcccttgagttacaaagtatccaattaccttttttttttctgaaacagggtctcattctgttgcccaggctggagtgcaatggcatgatcttggctcattgcaatctctgcctcctgggttcaagcaatcctcccatctcagccctctgagtagctgagactacaggtgtgcaccaccatgtccagctaaattttgtttttgttttcatttctttgtagagatggggtttctccatgttacccaggctggtctcgaactccggatctcaagtgatccacctgccttggcctcccaatgtgctgggattataggcgtgaaccctcgtgcctggctgcattctttattttaaaataattaagttattattgactataatcaccctactgtgctaccaaatagtcttattcattctaatttttttttgtacccattaatcattccacctcccatccaacccttcactacccctctaagcttctggtaaccattcttctactctttatgtccctgagttcagttgatttgatttttagatcccacacataagtgagaatatacaatgtttgtctttctgtacctggcttatttcatttaacatagtgatctccagttccatccatgtcgttgcaaatgacttgatctccttcttttttgtggctgcatagtactccattgtgtatatgtaccacatttcctttatccattcgtctgttgatggacacgtagattgcttccaaatcttagctatagtatactctggtttctcttcagattgcataaatctttcaccttttaccaaatcttagctattgtaaacagtgctacaacaaacatgggagtgcagatatctctttgatacactgatttcctttcttttgaatagatacccaatagtgggattgctggatcatatggtagtgcaatttttagttttttgaggaacctccacacagttctccatggtggttgtactaatttacattcccacaaacagtgtacaagggtccccttttctctacttcctttccagcatttgttattgactgtcatttggatataagccattttaactggggtgagatgatatctcggtgtagttttgatttgaatttctctgatgatcaatgattttgagcaccttttcatatgcctgtttgctatctgtatgtcttcttttgagaaatgtctattcaaatcttttgcccattttttgaccagatggttttaaattagccatttcactctaattcctgatggttgaaattactattttaacgaagtaatttaattaaatattaaataaataagtgattaaatatgaatgcataaaaagacatttgtttatgtaaaaataaggttgaaagatttgataaaatgaaattaagagaaaaactattcaattacatgtggctgagctagcacttaaagagttagagaaaaatatggattaatatccagaaggactctatagtcagattgttccacaagcatcttttatattttttattgtatttatttactttttatgtttttgagacagagtctagctctgtcacccaggctggagtgcagtggcacaatctcagctaactacaacctcagcctcctgggttcaagcaattctcatgcctcagcctcctgagtagctgaggttacaggcatgcaccaccaaaccctgctaatttttgtatttttagtagagacagggttcacgttgttggccaggctggtctcaaactcctgacctccagtgatccaccagccactgcctcccaaagtgctgggattacagaagtgagccaccatgcctggcccctacaagcaattggcctgttaaaaaaaaaaaattctaaaactggaatttgttgatggtgcactgtgggtgtgatttagcaggaatgatgccactgaactctaaacagcagacccattcccaaaggaacaacctggaccctgtctcactagattacagaatttgtgaacatctatatatttgaagttaactagtgttcatgtttctgtttgtttgtttttgactcttcaactttttcaattaactaataagctggtactcagctatcatatagaaattctaccttaatgtgcaaacaaaccaaatacaacaaaaactaaatattttaccactaaaagttcaagacccaaactaagggacaatatcaaaaagaaaaaatcaagaactgtgattttgatgacaataaaggaggcacctcatggcggcaggtggtgatgggaaagcagacaccaggcagggaggactcacgggaacagcacgctcacatcagagcctctcacccgactgctaagcacccaggcgggtcctatggattcttgcaactgtgatagccacttgttgacatcaggcctcaggtgttcttgggggtgaaagcactgacaaaatctctggcataaaatgatggatttgctaaaaatcaaacagtttttcattttctatggtcattgaggaccttgtataaggctgaagatctaatttaaaaactggtatcctgaagttactgtatcaacattgatttcttagttttggggataagggttgtaattggatgggggagaggcatacagaagtatctggggtacagtgtcatgttgcgtgcagtctacttttgaatgatttgggggaaagtggtgtatgtgtatgtggagagagagaaagagagaaggagagacagacagagagatggagtaggtgggacaacttaacagttggtgaacttagatgggaggagacaccagtgtttccggtactgtttgtcagctcttctgagggttgggtttaaactttttccaaaagaatttcttttaatccaagcaactaataaataattaggcttgtgttaattttaacgtgtgttaaaatagccaaagcctctggttccattttttgccattttgatcatagttgttcataattcatacatacagaaaatatctgcatcatggcaccccatcaaatagccatgcaattcataagccttcaaattggatgcaaataaaccagctgtccatccactgattcatccagtcaatccataaacacttgtttacgacatcttatatgccaaagataccagtgtgactatgactgcacaattccttctctcctgggacaaacagtcatcagaaaaaaataggcattgaatatctaactgcagaggctcaatgggagtgtataggcaaaggggaccagtctagtctggagaagatcaacaaacacttgcttaagctaagaccgaaagatttccagtagcatatggtgaatgtgactcttactccaagaaataaaattaagcctgtctcaaggcccccacaccttctcacaggttagagaattgccaatctgctcttcttccctctagccctagaggctcagaatccaggtgttgtgtggcatctgggaggcagaagaatcagaggtgatcattgcccatttgaaaacagtggccggcttcctccgtgcacacttgagcccaaggtccatgcccaggttaagcttccttacccagtatcttgtacccttgggtgaaggactcaggctttcctttcggaggccctgctgcctcttccagatgctgtgagggagtagcatgctcgggggtgggagggggcactgaggacttgcatttctgaggacttgcatttctgaggacttgcatttctgacaagtctccaggagatgctgccgtctgggaatccacactttgagttttagtagagtatacttaaaagatgtggttgaaaagagcattaaagtttaaaaacccagaaagacaagattaaaatcatttagtcaagacatgacttcatgatcccaaatatctgggaggaaaattgcaatgagttagtcttctagaaataagaaatatgcaactttgaggagactatagaatttccttctcagtcggttactttctcttcatttatttcaataggttattggggaacaggtggtgtttggttacatggataagttctttagtggtgatttctgagattttgatgcacccatcacccaaacagtgtacactgtacccagtgtgtggtctttaatccctcacccccttttacacttcccccaaagtccattgtatcattcttatgcctttgtgtacttatagcttagttcccactgctaagtgagaatatgcgacgtttagttttctattcctgagttacttcacttagaataatggtctccaattccatccaggttgctgctaatgccattatttcattccttttttttttttttttttttaatggagttttgctcttgtcacccaggcttgagtgcaatggcgcaatctcggctcactgcaatctccgcctcccaggttcaagcgattcacctgcctcagcttcccgagtagctgagattacagatgcccgccaccacatctgactaatttttgtatttttagtagagatggggttttgccatgttggccaggctagtctcgaactcctgacctcaggtgatccgcccccctgggcctcgcaaagtgctgggattgcaggcgtgagcccccgtgcccagcctatttcattcctttttatggctgagtagcattccatggtatatataccacattgtctttatccactcattgattgatgggcatctgggctggttccagatttttgcaattgcgaatagtcctgttataaatatgagtgtgcaagtgtatttttcgtataatgacttattttcctctgggtagatacccagtagttactttccattcctataaactgcagtgtatatgaacatgatgagtgtcaaatgatgaatgcctcaaaattactgtgtgctcccttcctggaatgacagcaaggcctactgcccaagactaaggaaagatattcagttaaagatactcttgtttgtgtgggtttttttgttttggttgcataagtagaattctccaccttaggaatatctagcatttctttttttattttccctactaaccatccagtatatctcctagatttgcctggcctctgccatcaacatattttctggagaaagcaaattaattttcagttaatattaacctgaagaaaaaataataaagcaaaggattaatatgtaaccatataatatgcagcatatatgtcaaaacacattttttctttttttgagacagagtctcactctgtcaccctggctggagtgcagtggcatgatctcagctcactgcaacctccacctcctgggttcaagccattctcctgcctcagcctctggagtagctggaattacaggagcccaccaccacacccagctgatttttatattttttagttgagatggggtttcatcaggttggccaggttggtctcaaactcctgacctcaagtgacctgcctgcctcggcctcccaaagtgctgggatgacaggcatgagccactgtgcccagccaaaacacattttaagtctattatttgaaactatttctttatttgttcctctgctggcagagaaaagttttaaaaatttgatgtccattggagctggaatgtgcataggtgtgagggctggggggtaagtgtgtcacagtgactagttaggtaggataaggtatgtctaactcacagctgaattttttgttttggttttggttttataagaaagaacattctgttgttcaaaatatttgagaataaaaaaagaaagaacattctgatactagcattaatgagttagtttgttctctttaaagatgtgtaatgggtattgatcctcttcccagtcttaaacattatttaagtcaaagaaaaccttaatatcacctatggaatatattgcatattaatctacacaaatatatataaggttggtgcaaaagttattgtggcttttgccattgaaagtaatggcaaaaaaattgtccaagtaatggcactaaccaaatacattgtgttctacataaaaggtacatatacatgtatacattatacatatatacacatacacatatatgaacattatgtagaacctaagaatttgccagtatttgaccactttttaactatgacagcagcaatttcttatgattcaattagatattatcctgaaaaaaaggatagctttgtcgtttccatatataaattattaggttggtacaaaggtaattaaaagtaatggcaaaaacggccattactttaacacttaaaattcccaagtacaatacaaatgatgtattcttatccgacatttctcccttatgcaacatgttctcagttttctactttattgctattcatatattgatatatttctattgatatattgctacaaggtcacctggctcctaacagatagtgtccaatactcgaagaacagagaaatgcatttgcttttaccctgccggttgggatttattcagctgtttctaaacaaaaccctttctctttccctcttcctagggttgtgtctgtaaagacaaaggccagtgcttctgtgacggggccaaaggggagaaggtaaaaacaaaccctaatactgcttgtttacactgtaaagctctagaaggtaaaactcaaccttcttctttcatcggtagcagaaagatccgcagtatgttgttccatttcccaaatccaatgttaaagtaattgtatataaacattaacctaaaaaaaaaaaaagaaaaaagtcatctaggaagcttcagataccttgtatatacaatggcaattaaattacaactctctcggtctgtaaagaataagtagcaaatgagaaaaagaaaaagaaagtttatgacaagtctccatatgtatacactatttacaatgttgctaaacacaagagaagaactgaaaacgatttgattcattcactttgacagaaaataaacattgaaattcacagatttttgtcctgcagcattggttcaagttcgccccctggtggagaaatcccacagcagcacactggttgaggcaaaacttagcagagggaagtagctccattgcagaattcaagaaaaaaaggaatgccgtgaaatctcattaattcgctccattaacttgcaatttgtgataattaagatagaggcagaactaaagtttttttctttgtttaccaaaccctttcctcagagacactaattaattgtttaacaacattgaaggatgactattttaaaatattttaagaacatatttaagctctttatctaaactaatttctatataatgtgtatgctaattataataattatacttattttaaattatttcataattcacatgtagttggatttaggttttttcttgaatctgtgaatgtattctaattcaggttcccattgagaagcactttctctgtgattctccttgcattcaagaagcatttattgagtttctattatttgcaagatgctactgtagggtgtataaaagtaactgagtagcgagaggggtctagcacattcttttatttctcttcttgttgagtgtgtgtgcacacacacaatgtaaaatagctgacttgttcttttttgttttaatttgccaattgtgtaactaaattgacccaattaaccaaatcagccggtggcctttactgttgaagagtacagtcggccctccttatccacggtttctgaatcctcagaatcaaccaatggcatactgaaaatacttcggggagggggggatataataaaaaataatacaacaattaaagataatacaaataaaaaaatgcagtataacaaccatttgcaaagcatttgcattgtattaggtattataagtcacctagagatttaaggtatatggaaggatgttctaggttatatgcaaatacgatgccattttgtataagggacttaagaatccacaggttttcgtgtggggggaaggtcctggaaccaatcccccaccgacactgagggacaaacgtaattccaagatacaaatccatggaaaaattatttgttggtagaactgtgtcaagccttgggcttaaagtactttcactcacttttactaggtactttcccctaatattatctgactccttctagaacattactgagctcacacctttttggttatgccacccttgctacctttcctgcatctcctacacaaataacagattaaattactaactcctgtgtattaaagaaagggctcagactcataacctgcctggtggcgttctttcaagctacatagtaattatgcacactccccaggcaccttcttgcacctgaccctcactgtctctccatcccacaacaaacactccactaaccttgatgcttctacctgggctttccctttcattttttattccgtctcccttaagctctgctctacatagccctaccatttgggagaaagtcaagtttctacaagaccaagagccaccactttcaagcctatagacaaatactaacaactggtagctttctggttgcctatgtagtcactcctgagtgctaattatgatttttttaatccaaggaaaaaacatgcaaagagtcaccatgaagtcataaacaagagaacataatggttattggtgtgtttattgtgggatagttgctgctctgtgtgtttctcacctcgttttggttttaacagggggagaagggctttcctggaccccccggttctcctggccagaaaggattcacaggtcctgaaggcttgcctggaccgcagggacccaaggtatgtcatcctgcaagcttggaaaatccccaacccacctaaccctcttcctgcctaccccctggctgctgcaaacctggagagaattccacatcttagccaactgctaggtgcatggtgaactcctggtttccggtattagtgggccacatagaaccgcaacctgctccaagactattgcaaatgatcatcattagcttcaagtctgtggctccagttcatctccctccctaacctacagtgtctacatctgcatctgttcctacctctattcctcctacagtgaaaactcagagctctttttgcttctattcaagacctgtccaaccacctgtgccccatctttgggattccttgttccacgaggtgcctcccctctctccggacattccaacttttcttttgttattggcttttctctttcagttcttaaacatgcaaatattttccatgataatacaaaacttcctctccatcttttaggtcttgtgaccaaaggattgctatcttctccctgactttcctttctctgtcaaacttcttaaaagaatagtcaaacatgctgcctgtagttcatctactattcagtccttagcaataatttgccttctaccacctctcctctgaaaacactccagcaaagatcaccaatgaccttcaagtggccaatgccaatacatacttttgtgtcttaatctgacctgaacccctctgcttagtttcaaattgtgtggatcgctctcctctccttgaaacacttgtctgtctttctttctgtatttctcctgtctctctatccttcccttcctttgtgggtttctcttttccttctggtcccttaaacatcccgagtctatgacccttcacactcatcacacattcttatcctaaagtctgtgatacagcaaagggctttgtttaaataaataccatagaggatttactaaataactgaataaccactggatttgctgagtactctttcctgctgtggacattagctagacttaagcctggcttctcacgcacccacacattcattcccctgactactgacctccagcaagctataaaccaactaataagctatgaaaaatgattataattgatctatacaggtcttttacaaatttcataatatattagaatatgtattagaggccagacacagtggctcatgcctgtaatcccattgctctgggaggctgaggcaggaggatcacttgagcccacgagtttgaggtcaacctgggcaacataaggagacccagtttctaccaaaaatacaaaaattagccaggtgtggtggcatatgcctgtggtctcagctactcaggaggctgaggtaggaggattgcttgagccctggaggcggaggctgcagtgagccatgatcatgctactgcactccagcctgggtaatagagcgagactccattaaaaaaatatatacgtgtgtgtatatatatatatgtattaaaataatgtatgaaatatgtaaatgataatcaaagccaaagccaacctactgcatatgtactctgtgccaggcattgggccatctatttctccctggatctcatttactcctcacatcaatcccacaaatcatgactgtggtgatttacaatgtagttcccatcattacctccactacatggatgagaaaacggacacagagcacttgagtaatttttcctgggtcacgcagctcacaggaagcaaaatcagagttcaaacctggtttgacactgtgtgtgggattttcctcaaaccaaacaattctccaactctctggatgccaactgggtacccctcaattcagttatgacattaaatacctggggttagtgcagaccccatagggtaagggctcagtcccacaagactgtccctgtttcaggactagtcataagtagtgggtcctcagttacccataatgccgtccaacttggctacaaataaatcaggggttcccatgacctcctcctctgctttgataatttgctaaagagtctcatagaactcatgggaacatttatcagtttattataagggatatgaatgagagatgaagagatacacaggagaaggtccagaagggtcccaagtgcaggagcttctgtcgccatggagttaaggtgcattaccgtcctggaacgtgaacgttcacccacccagaagctctctgaacaccatgcttcagggattcttatggaggtgtcatcatgtgggcaggatcaattataaactcaatctccagctccgctttcctcactgaagggtgcagctggagctcaaagtttcaagcttctaatcaagacttggtctttctgatgaccagcccccatctgggagcccaccaagagttgcctccttagaacaaaagacacttctatcacccaggatattccaagtgaggtcaaacaccaaatattagaacaaaagatggtctttactcccctatcactcagaatattagaagggttttaggagctctgtgtcaggaaccaaaggcacagaacaaatatgtgtttcttatgtcacatatatgatgccagaatcaaactcttgaaaccacacccacagcttacatgtaaaatgcaaaatcttgctgttttccagtaatcctgccatttccctgtctaccatatccatgtatgtgttctttttgtccatttctccttcttccgatcctaattttgaaaaagtcatccagattctgggcagaaactgaacactgacttcctctaaggcatggacccaggttttcttccatttctattggtagaacgagtttgccacttcaaccctggacttagatcagcctaatgccaattccgtttttaaaaaaattgttatctgtagcctactctgtttaattctcttcagcatttctttagagatgctgaaattcattaaaatagtcacaaacacatggcacttagtatgggttacatgagtgcaggcattccagaagattaatccagaaaacctgagtaccatgttgtcatagattgatattttaaagcatgtaaggcttacagatatgtatgaatagctacaaaagataatacaatcaaaggcagacaattagagaatattaaaacctgaccaaaaagatgttttagatttacaagattcctatcttaattttaaatgttttctgcatgaaaaaagtttacaatgagaaagtaaaacctgcaagtaaaaccttctgctttcggcatcacgtgaatagaattctgtgggaaggggaatggccttgaacacagccatgcaccccggaattccgccatagatgggagagactgactttggccttgacagtgcaatctcagaggattctgtaacaacccttttctcaaataataacaataaaattaaaaatcaaaacatactgaaactctctggaatgatgaaaatggcttttggacaatgaaactttcacaccacgtggcctagctgaaacagtcaccatttaagcttattctccaagaaataggacgtcgaaactgaatgcattacatgcccaaagcaagtttatctctggttcaggcagtccttacttggctatatatttccttgtgcatgtcaggcacattttgttaatagagtgtttcttgtgcacagaaatactggctggcattctcatccacaactgtagttgtgtcattcatttttatcagacctcagcagctgtgaggctaattaggacttttgcacagactttaatgtgcacaagaatcactaaagaatcatgttaaacatgcagattctcggtcaatagtctgggaggtgaggcagatctaagattctacatttctgataagcttccaggtaatgctaatgctgcaggccccaaaccccactttgagtagcaagggtttgaatgaatttttgtcttttctgataaacaattatcaagttccaatgaaataagcaagcaattgaatcttattaacaatgaaataatcagaagggcaaaacagcttggcatgtgactgagactgggtttgatgtatgggtttcttagtgccaaataattttcagagtgtttactttttcttttttcacttgaatctagggctttccaggacttccaggactcacgggttccaaaggtgtaagggttagtagtccaaccagtccaccctgatcgttaaaagatcagcttttcacagtaagagttatacaaatgtcagaaaggagtacactgtgtatggttccatagatgaagttcaagaacaggtaatactaatctgtaatggtagatgtcaaaggagtggttaccacattaggggcaagtgttaaactgaccaagaaaggccatgaaggaacctctggagtgataaagatgctctgtgtctgatgagatgatggtatataaaactgcacataggtcaacctttgttaagctgttcaattaagctgttctcaaaagattggagcacttcattgcatgcaaattgtaccttaggaatcgatccaaaaaagccaaaaataatcttaatgatatctttttaagagttacataaatgtgagatttacaaaagtttgttaaacctttagtatttgttttcccaatcgtttcgagctattcccagttatagtggaggaaaaagattatcgcaatggtaaataaatttatgtttatagattgaacatttttaaagttttttttttttgccaccccctcctttttcctatgtcttcagggaataagtggattgccaggattttctggttctcctggacttccagtaagtaatgggaaaaatccgtagctagaaaatttaaaagtaagctcattttaataaagatgttaaaacagtcgtgcaagaaaatgtgttctgatgcatttgttacatgaagaaaatagcaccttaggatggtatattatactagtgtgtggatttatatgacatatgagtcaaaatgtacttcctgaaatacaagcaggacaggataggatagggtaggataattagtaaattatatggtaagtcggccctccatatccagtgattccacatccatggattcaaccaaccaactgtagatcaaaaatatttaaaaaaaaacaataaaaattgtacaaacctaaaaaccattacactataacaactatttacatagaattcacattgtattaggtattataagtaatctagaaatgactttaagcatacaggaggatatgtataagtcatgtgcaaatacggtaccattctatataagagacttgagtatctatggattttggtattcataggggtcctggaactaacccccacaggtgctgaaggaaactatatgttacaagctgatagaataggataggatagggtagaatgaaatgattgtatttaatagcacagaataataaaatagtttcatctgtgcacactttcctcttctttttcccttcctttctccccagcttaaaacagcatgttaaaggactcttttattttatggataaaaggcgtttgctttatttgaaatatccacatctcatttgataagtcttcatatcagtcagcctgtttagtttgttgctactgaaattatatgtaaaaccacaatgtacatttactacttaaccatttaaacaatcatttatatttcaagagctatttaaatcagtgcatcttttcccttgggttcagtgctgtttcttgggatgaccctcctcattgagacttgttcttcttccagggcaccccaggcaataccgggccttacggacttgtcggtgtaccaggatgcagtggttctaaggtaagtacttttcacacagaagatgattaataaatgctttgctgaatgattaaatcaaggtgaaatggcaatgaaaggcagacaggcttcccttgaaaacattcctttaggccagaaccaacagcataatttggaggcaggaaacttcccattttctttcttcgcattccttgctttctaattgtcttttaaggaaagttctcccacagaaagaaaacttggagctcaactggttgttttcatctgaggctgtgtgtataaatcagaaaccaaagctttgagtgcagaattagttttggggaaggaatgactgagcttttcactgttcactcacctccttttgttttcgaactgagctctccttttctccagaatggtggccatgaatgaactaattactcaagtttgaaggaaacagcaattaaaaagttcttggcgcaattagactttgccatttatgcacaatttgagaaacagtattctaatcctgtttttaattaagataatggttttttggtcttcagcctcatgacccagtagccataaggaattcgggttactttgtctagatttaccattgcaaggttggaagcgagaaacaggaaaaatatctgaataggctcttctagaacaactaagaataataagaaactttgtatgtcttttagggtgagcaggggtttccaggactcccagggacactgggctacccagggatcccggtaggtttgcatgcctaattccccaacaaagacataaagtataaataacagtggtctactccatatggccatatacacaaatccgtcatgactttagggaagtctggggtagccatagtagacattcaactaatagttagggaatggatgaatacatgcattatgagtgtaggattagaggttgaggctttgttttacttttgagacatccaagtggagatgcatgagaggtacttggattcactcagagaagaggttccagctggtggtgactcaaggagtcagagtgaggagaaaaggggcttagaactgagacttagctccagcagtgatgttgagatcaaggagaatgatcctgtaaaggaggagcagccctggtgggagaaagaaaaccagcagaggtgtattatggaggcccaggaaacacctattgtagtagaagggagtggcagacagctgctggatgctgctgcaaagtccagtcagaggagtactgacatgttggcattggttttagcaacatcaatatcatgtctgaccttagcaagggacaattccacggcaggatggagcagggggcagatttggaactgaggaatgggtgggaaatgaacaaaatgggaagttcacaggtgagacgaaggagagacaggacaatatggtgggaagtaaaagattaagggaagactttgctttgtaaggccgtgggaggtgtacagtggggagaggatacacaatagcagagagggcagagcagaccgagtaggagtgtgtgcgtttgatattcctctagttgttcataggttgcttttttcctagggtgctgctggtttgaaaggacaaaaggtaagtcattggtggaatgctgtcactgaaaatctctaactgtacatatgaaaaggacgtctattaaataatgagacttaagtcattacaaataagatttcataatccagaccttaatcattcagaaacaataataatcgggacatgatatttattcctattaaatagctccttctggctcttgtcataaagagtcttaaggatacaggttttgtatcactgttgaaagaaatagggtcttggagaagaaaactgacctcatgctcagggccccacattctagggcagggattgtcactatttttggtatcttgggaaatgttttattacccctgcgtctttcttctttccactgtaaattttttatttttttgagatggagtcttgctctgttgcccaggctggagtacagtggcacgatctcagctcactgcaacctccacctcctgggctcaagcgtttcttctgtctcagtctcccaagtaactgggattacaagtgcatgccaccacgcccagctaattcttgtatttttagtagaaatggggttttgccatgttggccaggctggtcttgaactcctgacctcgggtgatctgcccgttttgatctcccaaagtgctgggattacaggcatgtgccactgtactgggcccactgtaaatttttgattttagaaaatatgaaaatgctttgaattcttcataatggaataattacaaaatcataaatcatttctctgagtacataacttgaaaagcatttttatctttgaagaaatataactttgaataagcacttgaaggggttttgaaaatataacattgatgatgtttgatgaacttcttcattttcaagggtgctcctgctaaagaagaagatatagaacttgatgcaaaaggcgaccccgggttgccaggggctccaggaccccaggtacagcacttcagagaaggtccctattattctcagtttttcactctctctctctcttttcgcctctctttacttcgtctctcttttcccccataagtccctctcactctcttaagaagattttaaatagaaattcctatttattctatttacatgtctggcctcatttcattctaaagctttcaccctattctggaaaactacatgatgctgatatgcaaagatgatttgagtatgtttttcgtcctcttcttcactctcagtcaccaagcttgcctgaatctaacaggaatagttatgtaccacttaatttgtatttgttgaaaataagggtagctttgtatcacacattgagtatcatttaaatctgtaattttaaataacagccctattttaaaatttgcataatgataaataaaaggtttttatttaaatgcaactctctccagttgaagttgagataataaagaaaagaaaggtttttgtttaaatgcaactctctccagttgaagtgtttgcttttctgatttatatgtacgtagcctgagtatgatccaaaagggatacaaagagacacaactgcctttggggctgtgtgtgctttcctttgtgattcaaaaagaccctttcatagacctaaaccacaagtgctaactttcaggttataattatatataaccaaaattagctagtatatatatatatatatatttttttttttttttttttttttgagaaggagtctggctctgtcgcccaggctggagtgcagtggtgcaatcttgggtcactgcaaccaccacctcccggattcaagcaattctcctgcctcagcctcctgagtagctgggactacacgcatgggccaccatgccctgctaatttttgtatttttagtagagatggggtttcaccatgttggccaggctggtctcgagctcccgacctcaggtgatccaccaacttcagcctcccaaagtgctgggattacaggcataagccaacacgcccagccaattaaccagaattattttaacttagttcagaattatatgtaaaaattcctgggtagagatgggatatttgcctaagtgagtttgaggtgaggctgttgaaatcctgtatggtgcgctatcctaactgaggatgtgaagttagattaggagctgcaaaaaatgcagaatgatgcaattaggagccattataggcttctgaaaagagatgcaagatatgatggctctcgcttttttgcttagaaaacatttaagagtccagatgctgaaggcaggggatccaggaagaagagataatagtaatctgagatattgatacattctttaaatgtgtattgattatcgtatatgtattagtcattgtgatgatgctgaagatataatgatggtacatttgattacacaagaaatattttttacctgccaattatgtgctaggggctatttctaggctctaggaatacagtagggcataaatcagccaaaatatagatttaaggctgggcacagtgctcacacctgtaatcccagcactttgggaggccaaggcaggaggatcacttgaggtcaggagtttgagaccagcctggccaacacgctgaaactccatctctactaaagacacaaaaattagccaggtgtggtggcgtgcgcctgtagttccagctacttgggaggctgaggcaggagaatcacttgaacccgggaggcagaggctgcagtgagcagagatcgtaccactgcactccagcctgaggacagaatgagactctgtctcaaaaaaataggtagatagataaaagatgatagatagatagatagatagatagatagatagatagatagatagatatttaaaaattgtatgaaccaggcatggtggcatgtgcctgtagtcccagctacttgggaaagctgagacaggaaggtctcttgagcctagttataggccagcctgggcaacacagcaagacccagtctcttaaaatatatatatatattgccttcatagagcttacattctcatgggggaaacaaaagcgtgtaaatgagtaactctatggtgtgtgagtaataaatgctaaaagtaaaaataatgcacgaaagcaggataggaagtgtctgggttggaaggtgggttacaactttggataagcaggaaggctttatggaaaggatgacaattgcataaagacaagaaaaggaaaagggagtgagttatactgatacctgggaaaaggggattctaggcagagggagagcaggtggcaggccctaacgtaggagcatgcttggccaaaatgagagagaaaggaaaagggagaagaaaagaggtgggaagaaagagaaaagcaaaattttgaaacgtctgaagtaaagcaactactttggtcattttagaaatgttatcgtccagttggtcctgccagcctgttacacatggcaacactttttgatgtttgttatcattagctgcagccactgaaaggggaggtgttatgctcttctgattttattaaaatattttaatgcatttaattaatggacattgttattaagtgagaagtaaatttaaacttactcttattcttctctcaatttcaagggtttgccaggccctccaggttttcctgggcctgttggcccacctggtcctccgggattctttgtgagtatcaagtcatccttgctacagactctgtcaactaatagattcattatttattattaaaaagttattaaaagaatttttctggttggatgcatttcctgctgtgattttcatttgtggatttttctagggctttccaggagccatgggacctagaggacctaaggtagactacagttcatatgatgtaacagctagcacaccctactcaatctcaaagccaaacctggtctgcttcttcatgtgggtcactgttaggcacctctctggaactcacaaggatccctagcagggaagagcatggctagctgctctcacctcttttctccttgcatttcagtaccttgatccctgatacaaagaatcttaattcaatttataagaagctacttatcacgaaaaaaggcaaggattcttaatccacaggttttccatttctgatcatctcacacagcacattatcctctgagtttttgtagtgtgctgcttcacaaagccaacctggtcttatgctagtaagtaaaagatgactatttgtgtgctcattacacagggtcttgcatgcatttctgttaagaccagcccaggcgcattggttcacacctgtaagcccagcactttgggaggccaaggtgggtggatcacttgaggtcaggagttcgaggccagcctggccaatgtgatgaaatcccatctctactaaaaatacaaaaattagccgggcatggtggtgcatgcctgtaatcccagctactcagggggctgaggcaggaaaatcgcttgaacctgggagttggagtttgcagtgagccaagatagcaccactgcactccagcctgggtgacagaaagaggcaccatctcaaaaaaaaaaaaaaaaaaaaaaacagaagtgcaattgttagtttaactataaaaatgttgagtgaggctgagccccaacaggaaattggtcctaaacacagtatctcctactatcaggtagccttttattttattctttctttctttttttttttttttttttgagatggagtctcactctgttgcccaggctggagtgtagtggtgcgatctcggctcactgcaacctccatctcccgggttcaagcaattctcctgcctcagcctcccgactaagtggaattacaggtgtgcatcaccactcccagctaatgcttttgtatttttggtagagacagggtcttaccatgttggccaggctggtctcaaactcccgacctcaggtgatccgcccgcctcagcctcccaaagtgctggaattacaggcatgagccactatgcccggcttgggtagccttttatatgaggtattttccaagatactttcatatttattatctcattgatacacacaaatgcacacacacacacacacacacacacacacacacactcatgcatgcacgcaccctgagagatggataggttctggttaagtgaattttccaatagacagtacatggcagagctgaggtttaaagtgttttgatctagctttggtctaacaaggggaagatctgcatactcagtggtgaaaaagcaagcagatatgagttgaaatgatggatcagccatcattagtgaagaaactattcgcattagactcatgtcactaaattactagtgaagtcggtagctggaattctattcttagattctctattaagtattgaatttcagaatcctgaaatgcagctacccattcttatttttaaaacaagaaaacaagagcatcaggaagttaagtagccggccagtgggattaaaactagctaatgcagagccagaaaaatatgctctgagctgggctcctttccctcccccacaccactgcatgtcagcatttgccatgttaggtaaatcccttaagctttctgcaccttaagagctcctcctttaaaagaaacatatcaatgctcttctctaagaaatagctaaaatatgtatcattctaaaatgaaagttaaaatataaatgctcccttacaaatattggaactttgatgggtttagactatttattcatatttatttttagaaaataatttggttttgtgttttcttacagggtcacatgggtgaaagagtgataggacataaaggagagcgggtaatttaaatactatgttttattagcaggcgagatattttatgtcccagagcatatcagcctataccgtttacttacgggccaagctgaaattgatgggccttcatttgttctatcttcccgtataagcactaaaggggaaaagtagacctttcaaacgtagtaacattgaaatgttgatgctgttgtttattttctcactcctgagtgtttttgtctttagggtgtgaaagggttaacaggacccccgggaccaccaggaacagttattgtgaccctaactggcccagataacagaacggtaactctgcgattttatgattagtgttgtgccttcccgtgtctaggatgaagtccttgtgaccctgcacctcttttacaagctcttgttatctaagtccagctcagcccagctccctcagccagccagaacctccaggattgattccttcccgtcctttactcataaatcctggaaatattacatggggaagatctgaggctccagcttgggcaacagagtgagacttcatttaaaaaaaaaaacaacaaaaaaaagatacttaaaaaaaagcttgcaggtagtttcagtgagttcgcaggtataaaatttgaaatgtgagaaatggaaggtgtattgggttgtgttaacacgaggcacattcatagtttgtaaacccagtttattgaacagatagaggatttgtcccactgttgaatcagtgaaatctcatttcatccatttgtaacaatgttgaactgtttctttggcaggacctcaagggggaaaagggagacaagggagcaatgggcgagcctggacctcctggaccctcagtaggttatttaaagttatattgtccccataacacataaagtagagccttagtatttactttgatgtgtgttttgtcttaagttgtttttttttttaaagaaagtaaaggaataaaagaatggctactccacaggcagagcagctattgcttttaagtcttaatattggctaaaatacaataacatttgaccgcagagatcatgaatacactagagttattttacggccactcctagctgaaatccttgcactgctgtacatgcacccaatgccacccatcctatgacttatcttcagcatcagcttttttagcatctgttttttaattactattcatcaataagatttctctcttagatggctcagcactgaaacatgtttttaaatggcagaataaccaaaagggacaaattaataaaaatcaatgtaagtaaaaaaatcagtaattcataaaatttgacatggctctaattaatacagggactgcctggagaatcatatggatctgaaaagggtgctcctggagaccctggcctgcaggtaaatttggaaattcggtgtcatgtgcagttttgattagtcaggacttgggactctttaggttacaggaacaagatgcccaactcaaactagctcaagctaaaaatttctgttctttaagatttgggaggcaggatttacttactcaagtatctaagacgttcaaggctaaaacagggttcaaggacttcagagcctgaaaacataagggcaggactccctctccatctcacttctgcttctctctgcatatcagcctcattctctcctctggcagatgatcttccatgtcaggggagatggggagaaagagctaccctgcagcagacaacttcaggctaatggcattagaggagaaagagagcatatttctccctgtgtccatttataaaatcccagggaattcatctcattggcccagcttggtcatatctggtctcactctggataaaaggcagtgaccaagagaaaagggtactataattggccaggccagtggggcagtgggctactgagactgacagtgccatcagaaccacccagagggagggaagagcagcccccacaaaggaaatagggcaatctgtgaccagaagtgggcagctggaaaaacggaagcagcaggggcccccactaccccacccagatccattttggaaagatttaaatccatatattgtgttaaatctctaaaagttatacatttggaaaagtaaaatctacaaaacttatacataagcaaagaatgtattttttggcctgagaaaaaatattcaatgaacatgatttttaaattttatcaggaagggcaaataccataaaagtcaatccaaactgccggttgagataccacactatatcttttatacatatatttaaatataggcagacctggggtccaaggaattaccaatatttcaaataaataaataaatggactgtaaacaccttcctttttctaggcttccttatttacttctctgcccagtgtgtgtgtgttttttttttcccttccaagtttagaatgaacagcatcagctctaatttaagtttggctgttaatgtccttccttccttctctgactttctccagtttcccattctgactggcttctgctttccctggaaagagagggccattgtgtattctgtggttaatagtttttccttctaacacctgggtgaagatctttactcaggcttttcatgcctgaggtcaagaggagatgatcatatcacttaagatttccgtatttgtaaagttagccatatttattacatttcatgtttttgatttgtttttgctgtagggaaaacccggaaaagatggtgttcctggcttccctggaagtgaggtatagagttgatttggcctatggaggtagtaaaaatgtcagtcctactagctgaagaaggattttttaaaatcactaaatagttataaacaaacaaaaagcttacagcttttaaaaactgcatttgggaatcatagttttacatccccactgtgaagagagatcatctgagcacattcttttgtttcagaggagttcaaattgcacctgctcccccagaagaagttggctcctgtgtcttctgacccatttctttttgttcttttctttagggagtcaagggcaacaggggtttccctgggttaatgggtgaagatggcattaaggtaatcctctccctaatagcctattttaataggttgggttttgcctgtgcttttacttttacctccaaccctggacctaagtacaagggattacaataacagacttcattcaaataccctactaggtctgttaagaagaaaagagagatgtggcaactttacttaaacatttgaagggtgttcttgaggaaaaggtattaaacttgtactgtgtacttgaagctgtctgacttaggaccagtgagagtgcagcttcccatgaggaagaggttgaaaaaatcctacaattgtaggaagtttgtggttatttgagatcaagcataggctagagttcatgagtcttaatctgagtcatgatacattgaaaggtcatgatcaattagttgtgaactgtattctgcccttctgacaatatgttacaaatattttcaaatcatgtgtagtcatgtgttgcttcaagatagggttatgtcctgagaaatgcatcattaggtgattctgtcattgtgtgaacatcatagagtgtactcacacaaacctagatggcagagactgttgctcctggactacaaacctgcacagcatgttactgtactgaataatgtaggcaattgtaacacaaaggtgggtatttgtgtatctaaacatagaaaatatgtagtaaaaatgtgatattataattttatgagaccactatcatatacacagtccatcactgacccaaacattgtcatgtggcacatggctatatatgtaggtatatgtgcagagtcaagatttaccctttaatagtatcacttccagtagaattctgaaatgacttcttgaaggaaagggggttggttacagctgggacacttggaaatgcatacaccccacagactgatattcctgtgcctctgacctgggtgagaacacaggaacatgcaatgaacatgaacaagcattgcagatggtgttgtgaaagaaacctggagaaccaccagggcaataactacttctgtacaaccttgtagatgggattccttacccagatacgcgctctccaggaaaataatttaaagtcagtgtctctttaactttaatttggtttgtacatgacatctacatatcaatatattgttcattttaactgtacatcttgctttttatatgtaaatactttgggtgaccatattcacaatttgtaaatgtctttcactgtagggacagaaaggggacattggccctccaggatttcgtggtccagtaagtgtgattaaagacaatatcaatgctatgtttgatcaagttctttaaagtagcaaggaaattttgaatcagtgtctctcattaactgtgtgagagagattataacatttaccttgttgtcaaaccagggcagaaaatagctggtcactatgtgtccctttgaccacgggtaaatatttctatttggtccctggaaggcactagtgatgcccatgatgggctatggaagagaagaaaagctttgtctaagcagcccaggcccaaggtgatcctgccccttcagggtagaggacagtgagacaacaagggatgaagaagtcaacttctcctccctccacctgggcccgggttatgacaacgtgtttaatacatggtcagcaaaaagcaatcattccggcccaagctctgtgtagcaggcagtgctccccttcccagtggacatgtatttgatgtcagctcctaactgcagagcagccacattttatattctgtgactctgcagctgacgaaaaggagaaaggggacccggactctgagtgctggtgtccattcatctcctacctcaaaaaacagtggttctcacattcagtgcgccaagcaaggctgtcgtgaatggtcatgcaggttaaacaaaacggcacatggtggcaaaagggtcatgaggggaaggggtgtcctgttaaaaatgcagttctcagacccccatgctcagtaatgtaactcaggaattggagtggggcctggaaatctgcatctttacactggatgcatagagcccctgtcttagtctgttctttgctgctacaatagaatacctgagactgagtaatttgtaaagaacagaaatttattttcacagttctagaggctgggaagtccaaaatcaagatgctgacccttggtctggtgagggcttttttggctgcatcctcacatggcagaaagcagaagggcaagctgacctgaggctgctcaaagcctcttttaatagggccttaatcccattaatgagagagaaacactcatggcctaatcacctcctacagaccctacctcttacttctatcacattgataacacctgaattttggagggagcacattcaaactatagcagttcctaaatactttagtggagttgccaggaagattaaataagtattttgtgaaatcacttagcactgtgcccaacacttggtaggtgcacgcatatcattacagatttcatggtggacattattatgttatattattaatataatacttttgtgattttatatatattgcttaaccacaagactcttgttaaataagtcaacaaagtaattgatccatctagcatatgaaaaagcaaagaggttttttttttttcaaacctttgatatttccaccttttttccttcaagataaatatactgaatgctaaatgaaatctaccttttcattacatttcagaggaattcttagcactcttcactgtatattttcttatattcaattccatataattctgtttgcagcttctactaacctcaaaagaagttccacttaggaaggaaatggttaagaacaccagcagtaggtccactgagcatgtcagaaacaatattcctcgattcttgcaggtcaaggattccctggaatttaaagaaacaataaatacagtattttttgatgtgtgggttccatacacttccaaaatggaaataagttcagtccaccaggaccagcaattttgaaaagtgaagtagaatagaataaaaagtatcagggttgatcatatgttgtaataataagtcattattttgtgaaactttaatttttctatacatatacacacatacataggtatgtatgaatgtgtacatataaatgtgggtgtgtaaactgagtcacatcataaaatgtatttctaattgaaagcccataaaatatctgatactgtgataccacaaaggtctacttatttaaatttttccacctacatttacatgactatcatatacctgctaacatgtaaacctatgaattcaggaaaataaggaagccatctttgggccaaaatgaagaaactgaagtaatgatgtttggtgagctgtccataaatagctatcctttctctgtatttgtttctttctcctctaagacagaatattatgacacataccaggaaaagggagatgaaggcactccaggcccaccagggcccagaggagctcgtggcccacaaggtaagaataaatttcttcctaaagcatttgctgaacatatttctggctttctttcaaggtaataaatagcatgtgcttatggaattgacatgggtgaggaaagggaacagagatctcttcattttcataaaggtgttattttttgatgtctcctgctcttcatatttttatttcataggttgtataccaggaaggtaattaaattatctttatgtagcaaaacataaagttcaaatctgtcatggaaacatttgctggagggcaggaggagggagtgcaaggcattggcaatctcaatgggattacgaagggaaaaatggagaccgcgaacaaactcacacagagatgtgcaagggggaactgaaaccctggtttcctgatgcttgaagcaatgatctgtccttgatgccgtgaattattgtcacatgtacttatgctgtatcactttggagaaatccaaaagttctgggccaatccctctcatctctggctacatattgaaaaccctgggaacttctataatggcctcgtcaaggtcccaccctgtgattctgatttcattgtctggaggagggctctggacactagaagattgtaaaaactccctggactagtccaatgtgcagccaggattgggagccactgatctagacaaattattgctatgaagaagatttcaaaggaaattctacttaaaagaataaaatttcccagtgtatttaaataaaaggacagatgaatacagacattgatatagattttcttaaaaatctggtacacttactgtaaatcactcacatgtatatataaaggaattataacccccagaatattacagatggaagcaatctaagatggaacaccaagacaaactgctatcctggatgttccagcactgtttgattttctggtgtctacacttccagcaaagtgctaaacacagagcaggctcttagtaaatctaggctgaattatgtgaaaatgataaggcagcatgatttacttttgagtgttagacttccaagattagttttctcttgtctaaataagtgaaaatttctgatatttgtctaggtgagagtaggaaaaaagtatgaaaactctgtattattaactatcagtatattgtcacccaagattccaaaagtggatgggacagcatttatatctttctaagcaattaattaatgttatatattcccaggtcccagtggtccccccggagttcctggaagtcctggtatgtccatgtttcttggggtacaaatagaaatgctattacaaaggaaaataagctgtcctctattaagtttacattatttacataagacaaatgtttcattaactgatctagaagtgtttccaggctgggttcaatggctcacgcctgtaatcccagcattttgggagaccacggcaggtggatcacctgaggtcaggagttcgagaccagcctggcaaacatggcaaaaccccgtctctactaaaaatacaaaaaaattagctgggcgtggtggcgtacgcctgtaattccagctagtcgggaggctgaggcagcagaatcacttaaacctgggatgcggaggttgcactgagctgagatggcaccactgcactccagcctgggcaacagtgagactctatctcaaaataaaataaaacagtgttctcagcttcttaaattgtcatctttgcaatttatagtggaagaaggagtggagctgatacaaactgatacagaaatgctctttttctcttctcagcagttttaactatttgcaaaagctttattgtccgggatttttacagtgacttttggagtatgagcagggaccttgaaactcagaggaggtacagaaatagaaaacaatgtcatggtaatgaggttgcttgaaaatgacagttttcataacatatcatgagttgcataaggatacctacattacactttttctgtaaagttctaaactttcgtctctgactcattagagtgtttaccttttgagagaggaaaaagagttggatcagggatggtccacagggactcatcaagtataactgtagtgtgttctttttaacgaaaacaaaactaagaaaaaagagcaaaatttgataaactactgggcatgtgccctgccactgatcatatttttctctatatgatgttgtatattatactacttcataattttgaaaattaatcaaaataaagcagactgcagaactataagtatactataatttcactattaaaaaaatagatacagaaatggataaatattatatgtacctgaatatgcatggaaagatatacctcaaactgttaatagtagatatctcttacagttagaatggggcaaaaagatattttagagctctgacattaaggaagacctccttccccctgccaggcccctaagtaaaaaaaacaaaacaaacaaacaaacaaacaaaaaaacaggctcctttaataagccgatgagaggaaaactacaaagctctaattccagaagaattttaggatagttttttctgtttctgtgaaaaatggcattggtatcttgataggaattgcactgaatctgtagattgctttgggtagtatggtcattttaactagattagttcttctgatccatgagcatgggatgtctttccatttgtttgtgtgctcttcaatttctttcaccagtgttttatagtttttcttgcagggatctttcaccttgttggttaaatgtattcctaggtattttattgtgtgtgtgtggctaccgcaaatgggattgccttcttgatttcttttttggctattccattattggtgcataaaaaatgctactgatttttgtatgttgatttcatgtcctgcaattttactgaatttgtttatcggctctaagagtttttttgatggagttaggggtgaagagagattggttaatgggtacaagcatacagctagatagaaggaataaattctaatgtttgatagcacagtagggtgactatagttaacaacaatgtattgtatatttcaaattaactggaagagaggacatgaaatgtactcaacacagaaatgataaatacttgggtcaaagatactcaaaaataccctgacatgatcattacactacacatttgatacatgtaacaaaatcttacatgtatcccataaattagtacaaatctaatatgccaaagtaaaatatgattaaaaaaatacaaaactctgaaatggatgtcaatcagaagattttatctttgtgttcaaataataggacataatcagatattaccccggctggtttctcagtcctttgctggtggcatctctcttcttaatagttaaactgtttgtgggacagagatttgagactgtcccctcctcacatcctcaccactttaagattagggtggggttcgtgccaccaggcacggctcctttcccaggagatgactatcccccatcacagccttttatgtctaagacactggcaggaataaagtccacttaacaactttctctctttctcattttgcgcactgggggcatcctctagtctctaataaaaaaaatctacaaagtagcatatatggaagtattcctcacttccttttaaataaaaagactatagtgcatcccaaactctgtttcagtttcttgtaataaattttcttgtgggaatggaatgttctgcacttcactgtactgtggttatttaacaaggccacagatgaaaaaagcaaggatattcacttttttattttatatgtgttatgtacctctccattgtgcaatttttataaataaaattaaatcactcttgcaattaaaaaataaattcgtattaatcaggaaaaaatgtaaaatacaagaaatgattattttctccaaggatcatcaaggcctggcctcagaggagcccctggatggccaggcctgaaaggaagtaaaggggaacgaggccgcccaggaaaggatgccatggggactcctgggtccccaggttgtgctggttcaccaggtcttccaggatcaccgggacctccaggaccgccaggtaaagatgtggaaggggaccccttttgtgcacagtgccaaatgacagatgtgtgcaaaccacgggcaacaaaccctcctcacagcttagccatcagtctgtgtggtttttatgagttacctttccaatggtcttcatttcactaactgtctgtgaaagaaactgatgcaatgactagttaacaaatgcagcaaagtcttagcccgagtttcccagagagcagagtaggaggcagggacaaagagagtgatgtggggaaggatgggtggctatcaagttggccttgaccaattgcaactgcctgttcagccctggagactatctgtgccaggggagaaagaggcaagaatttatccatttgctcctagttcccatgggtcaaagatttccccccaagagaggagccgccccccacctcccatcctcccacttccaggctgtgtctgcatggttcccaggaagtcccatgccttggcatcagcagggaagccccaggacagtaggccagaggtgtgccgcatgggtgtaaggcaacatgctatgaggtaaaggggtcagagatgacagagatgtggcccaatggacttgaagtggtgctcagaggtcctgacacagggagcctttccttcgcatccctctagagagccacttagcattctgtgttggctcataggtacaataggtcctcacaaacatatagatcacactttatattttaacataccttttctggggccaggtgtggtggtgtgcctataatcccagcttcttccaagtctcttttaagatggaggtttagtatcctctttttttctatgtcaaggctgacatacagagttcacagggctaatgaagctaaagctgggatctgggcccaggtgcttgcggctctctcccgaaggtgtcatgctccctctgtgcctgctacactctgtccaggggtctttgcttcctactttcccttcgctaagcaacacccatctgtccttcagacttcagcttcaagttcaagtccagcagaaagctttcagtgagtccacatcctgtaacctccaaggttatcccaactgtagaagttttcacattgccttctctttgtctttgtcagtttttcttacaagaatcaaagtattttgaggtcaaagactgtgtctttttggctgtttaagcccagtatgtagcatggggaacactgcaggtactcagatattttttgaattaagcattaattgagtatgaaaatgtataagtatacaaaaatgtatgaatgtagaagtattcatataagtctacactaagtattaaacttttatcagattgtactatttaaagatgaccttccaggtattttaaagatgcagaaaactgatcacaagatggtcattctgtgttccaacaaaattaaatggttccagtggtaccttgtttttctgaaatttgggacagctatggtagtgtttttaaatatttactttcatcaccattgccttcaacctgtaattgaaatggcaaagccaaaaattagattactgaacacaattaaccagtttaagagaaggagctgttcattgcaacattacagtagcagataatgtggaagctgagaagagctttcttagagacctgctttaaggatgacaactcaattgatgtggacaagcaacaaagagaaaacagatgataccctgagtcagaatccatttttcttttactcaatatatattaagcatctacagtatatcaggaaaatacaatgtatccaaaaatatccagaataagagttgatcctttgcctcaagatgctaaagggattgtctgtgtattagtccattctcatgctgctaataaaggcatatccgagactgggtaatttaaagaggtttaattgactcacagttcagcacggctggggagtcctcagtaaacttacactcgtggcagaagcagaagcaaacatgtccttcttcacatgatggcaacatggagaagtgctgagcaaaatggggaaaagcccattataaaaccatcagatctcataagcactcattcactattacaagaacagcatgagggtaactgcccccatgattaaattacctcccaccaggtccctttcatgacacatggggattatagaactacaattcaagatgagatttgggacacagccaaaccatatcaacttggaataattggaaacaactaagtaagataaaataggttgattctgtgaccaaaaaaaaaaattatacaatgagctttcaaagatcaactaccttaaaaataccacatctatgtaatatgaagggaagagctggtcaccatgctttctcagttgcagataaacttctaaagactaggcttccaatacaaagatgagagagatgcattttaaataatacatatattacaatacttgctaattgaaaaaaacacaaataaaaaattgtctttggtgctgtatttttataggtgacatcgtttttcgcaagggtccacctggagatcacggactgccaggctatctagggtctccaggaatcccaggagttgatgggcccaaaggttggttcaatcaataatgttgtattaggataagcctttttcatcgtcattattatcactgatttttccccctgagataacaatgatcccaaatagctaccagtcagtgatgacttattttccattagctaaaagtattcatttatctgtaaatcaataatttatttggcacccatgcaataaattgttggatatccctaaaatgtgagtttttgcctgcatgcaaggaaagaaacactgaaatagatgttttatgttagacttttggaatttcccctttcagaagaactgtatagctcagaacattaaagtaagcagatctataataaatgaatttttaaattaatatgtataacgtcctagataattttcactacataaaaatgtttaaatgtaataaatgatagtgtggttggaaaatatttgttctttctgaggactcaatgtagctttttaagtaatgctagtatgctctcattgcaggagaaccaggcctcctgtgtacacagtgcccttatatcccagggcctcccggtctcccaggattgccagggttacatggtgtaaaaggaatcccaggtacaaacaatttgcatgcaagtgtttttgcaagcacaaaagggtcaatacactggaagaaaataaaggcattggattggtggatgtcacaacgtggtttagatgaacttggagggagagtttcaaaaacatatattctattaacataaagtcagccaaaatccaagaaaagctggtatttttccctattccattttagttgctgacccctagcaaagtattgtgttaggcaggaattgtgaacacagagtcctacaagagaacagcagttaactgaaggcagtgaagcagctgcatgaaacacacaccctctttctcttccataaagaaatatgctctctccctttttttctcaaaagacacaaccctactcagtccattttttcatgttcctacttttaaaagagtcatagaaaaatgtggtatttcactttcttcttaaggatgcaaatgctctttaaaaaattgcaacatcctccgtgctggggacaagagagttgcagaaatgcaataaacaaactgagggtacatttgaacgggccagcgggcacttggctgcagcccattgttactgtgcaacatgtcaggccctgcattaataaatcttccaagttttcatgagaagaaaggaattggaatttttatttaaaatctcatggtgtttttttaaaaaaatattagccactaagtcaaattttgaaaggaaaaaaaaaaaaacacaacattttatagccagtgtcctgaggcttaaataaaggatgagtcacaagccttctcttgacaactgtgtgccaggccaggactctccacaccacacggttactcccggctgtcaccacctctgctttcgacctccccgtcttcagtcacagaactgcctatgggcaaaactttgaagtacaaaacgtctctgtttactgactgggttcctctgcccctcgggccactcccctgactacacagggcctctctctccctcgctaccacccacagtcctgactctgccaccagcaccttggtcttcagacaatgtcatcaaattatgtatcattgaccattgagaggtgaagttacagagcccttggcctgtgtgttgggcgctgttctaagggtcttatgtgcctccattcctttatctctcacatcagcccgagaggctggtgctataattaaccgcattggacagatgaggaagctgaggcatcaggtggcatagctaataacatggtagagactgaactgaaatctagacgcgtgctcttaccctccacgcctgcatcccctgactgcggtgctgtcgcctgtctcctagggggctgcttttggggagttaatccaaaggtctacctgacaacctggatagggaacattatacattatcactgtccagtagccatttgcattggcatagggtcttctgggagactgggtctcaatccaaagatgaaagactaatggcggcagccgtgaacactgtggtcagccactggatgacatgcacttgggcagggatcctttgtcccctcagatcccactcacttctcctttatgaaggcctctgctactttcagtggctgcccctgccctgactcacaggcttgtgagggaaggggcaggggggaggtaggagctgttcctcttgttactcctgttcagtatccaaatatccagcggaaatgttctattaaaacaaaaaccaaaaggaaggaaatgaaggagggaaataaggaggaaaaataataaaagataaaaaatcattattttcctatactctccttgagtctcctctttggctcaaggggagcaggtgagcagctcactgatgctgaccacttattgcattgttgcattttccatagtttctctacatttggcctatccaggtgcagctcaaagaagatatgtaagcagtaaaatggtttggatcactataaaaagatacaccccagctcaagatcttgcaaaaaatagaatctgaataaatatgtgttgattaactgaccagagacccacccagaaggtcatttaaagggatcatcttgatagagatatttaaatacctatgggaagtataaaattgtacaataaaatgcaatttggcaagagacattcaaaaccttagaaaagtttgagactatttggctctgctattacacttttaaaaatttattataaaggaaataattggataaatttggagagctaaatacccagagacatttttcaaagcattgttcacaacagctaaaagttgaaaaatgtctacctaatgtctaaatgtctaaaaacagcatttagctaaataaatgatggctcgccaacacaataggcagcatgcagccatttaaaatgaagctataaattcatacttattgacatatgtatactataaatccaaaatagtgtgtctacgagtcctatgcacttatggatataaaaaatgtatcattaatttacattaaactttggcaaatattatcttctggtagatttataggtgatttttagtctcttctttctgcataattttcttataatgagcatatattacttttaaaagtaatatatactcagaaaaaataaagatatattcttaaaattatgaagataaaattttaagaagctaagatctgagttactttttacatgatctcttgttctgttatttactcccattctcttattgcatttatgttttatgatagaagttgtctttctttccccacaaggaaacactctattttcttcatacattgtattaccctgtctacttagagttggcgttcaatgaggagttagttaataattcgttgatttgcaggaagacaaggcgcagctggcttgaaaggaagcccagggtccccaggaaatacaggtcttccaggatttccagtaagatttcatgtttttaaatctttagcttcaatttgacaaattgcacactctagaaatatggttgcaacacacttaccagtttggtgccttgcaaacagtaggcacttaatagatacctgttgattaaatgaataaatctgtgactgattaagtgaatgagtcaatgaatttataaacagtttgaaatggtatcagaaacagaaagcagattagtggttgcctagggctgagagtgggaacagaggttcattgcaaataggtttgagggaatttgggagagtgatggagatgtttgaacgtgattgtggtgattgtggcataattctataaatttactaaaaatcattgaattgtactcttataaaggagaaattttatggtatgtaaattatacctcaataagtccgttaaaaattagaatcttgactgtcatagtgaatcaaaaagttatagataaatatacttagatcaaactattcaaagaggcttgttaaaatttaccaatattcaaacataacctgtattatggtgattgttctatggtattaaattatattattgtctgtattgctttgaattatactatctaactgaattatttttcagttttggaagttaacaacaaagcaaaacaaacaaaatgcttgtaataatagttgtggaccaaagagtgtgttgaaaaaattcatgttaaaattgaaaagttcttgtccacactgtttttaagattgacagaagaagaattctaacaaaatacaatacagattcatttgtgtactaccctagggtttcccaggtgcccagggtgacccaggacttaaaggagaaaaaggtgaaacacttcagcctgaggggcaagtgggtgtcccaggtgacccggggctcagaggccaacctgggagaaagggcttggatggaattcctggaactccgggagtgaaaggattaccaggacctaaaggcgaactggttggtatttagcaactttaccctccctataaatgaagtactctgaagttaagagataaagtgatttcttttccaaaaatggttggccgctcagcacagttcatcactctaactgcagaatgaaacatcttcaaattagcaggaataacccaagcaaatagttatagtattttgacagaataaataggtagcattcagtgatttcaaccaatcaaaattctacattgataatgaccccatctcatacacaaattacagttccatatttgtatcaaatgagtctatggaaaagttcagaaaatgatgtatagtagaaagtttagtaaatattttggggcgatgtccatatttttaaataaaaataaatgcataagaagacagcatatttaggggtatggtagtcaaataaagagattaaatgttttgtcattcatttaattttatggaaatttaatcccttttcatgagagagtttctcacatatttaattgaggtaatacctaccaagattttttttttttttttttttttttttttgagagggagttttgctcttgttgcccaggctggagtgcaatggtgcaatctcagctcactgcaacctccatctcctgggttcaagtgattctcccacctcagcctcctgagtagctgggattacaggcatgtgccaccacacccagctaattttgtattttcagtagagacggggtttcaccatgttggccaggctggtctcgaactcctgacctcaggtgatccacccaccttagcctcccaaagtgctgggattacaggtgtgagctactgcacccagacctaagatttattttaaaatgtcacagagtgagagggtgagcacctgtcatcataatgtatttacaagaggtttgcaagggatgctgcccaaactattctatgaaataccagtttctcccagggctaatctgtgttagccaataaaacagatcttacctcaaagaggtttggagaaacttggtaaacaaatttaaagattcatttacagaccctttaatatcagaatatgaactgtgagtcttccacatgaagataagctatctggtctttcctaaatgcttctgactacaaaaccctttttggctggcagcatctatggtgccagcagttctcagaccctgccttggccaagtcccaggttgttcactttgtggtagttatgcttataaagtgacagtgccagaattctgatggtctaatattaagagaatttgtatgatgtccctacttgcatctcactgatttttctttataagttctggtaaagatgctccataaagtaaatgagagaaaaatcaaggtggtgatttgttgagtcttacaccctgtcattaaaaaaggagacagaccacttagccatctgatgatattgaacaatgaaaaattgagtcaaatttatttcagagggccatgttgggaaggaagagggcttaaattattttgtcaaattcaatttcttttaaatctacaaatcattttcaaggttatagcatatgaagatttaaaaactagacagtttatgagagaaaatggaagtgggaaatcccctttgtcatgaaaatacctggtgaaaccagaaataaaggtttgctgtgctcattttatttcagaaatgtaacattatcatgaatatcaccactaaagtcatttgaactattggtcaatttgaacatagttttagtggctattaccatatgggagacccatcattgtaagatatctcaagtgggactcaagacagttccaagttcaaaaaatgttgctaaactccaaaggacacaaaacggaagaaacctgcagtgctcttactttagtaataattctcatcaaatgccaaatgcttttaattcaagatctcaatgacagcctaactggtattcatatttggaggatgattaacctgttgtaagaatatactggaatgaagcacgattcaaacacattcctgttgtcacaggctctgagtggtgagaaaggggaccaaggtcctccaggggatcctggctcccctgggtccccaggacctgcaggaccagctggaccacctggctacggaccccaaggagaacctggtctccagggcacgcaaggagttcctggagcccccggaccacccggagaagccggttggttagttttctttccagtcctgttttccgatggagtgggttgatggtttctagagctaacgaagcttctccaagactaaggaaaatatagaaacttgcttctaacgaatagaatatgtcaactcacagataccaggaaagaatatgtagggtatgttagagaaaactcattttttctccattactgggcaattcaactgaaatttcctagaatattctatatctattacatacatacatatatatatatgaaatgaatagatcctaagcgttattgcaaatttgttttttgtggttttctagagacagggtctcactgtgttgcccaggctggagtgcagtggcataattatagtttactgcatcctcaaacttctgggcttaatagatcctcctgcctggtctcctgagtagctggggctacaggcacgtgtcaccacgaccagctaatatatattttatttttattttttgtagagacaggatgttgctgtgttgtccaggctggtctcctactcccaaccccaaacaatccttgcttcagcctcccaaagtgctaggattacaggcgtgagccactgtgcgcagccacaaatttgttgattttgatccataactccataggcaggttacaaataaaactttaaaatatctaagacaaatgaaggaaaatggtctgataatagtttaaaagtccaggtaacttttgggatatacatatactggccgtagttctggattcaggagtgtggctgaaggtcagaatagcatgctactgatagttttgagcaaataatgccaacatggtcatgttttacttctaaaatcaccttaggctgggcacagtgactcacacctgtaatctcagcactttgggaggccaaggtgggcagatcacttgaggtcaggagttcaagaccagccgggtcaacatagcgaacccccatctctactaaaaatacaaaaattagctgagcatggtggcacatacccacagtcccagctacttggaaggctgaggtaggagaatcgcttgaacctggaaggtggaggttgcagtgagccaagatcgtgctactgcactccagcctgggcaacagattgagatactgtctcaaaaataaataaataaataaataaataaataaataaattttaaaaatcactttaaagggtaagacccagtaaacctctaaatcattttgtagtgtcttccctcatcagtaaaactttttgagtgcacaaccttacattatatgttataaatgtatgcatcatttctgtccacacatgtatgtaaatcttattttatgactttctctatatattaaataaacaaataaatatttatgtttatctgcaccttactttggagctgctttttttttttttgtctgagatggaatcttgctctgtcgcccaggctggagagcaatggcgcaatcttggctcactgcaacctccgcctcccaaattcaagttactctcctgtctcatcctcccaagtagctgggattgcaggcacctgccaccatgccaggcgaatttttatatttttagtagagatggggtttcaccatgttggccaggctggtcttgaactcctgacctcaggtgatccacctgcctcggcctcccaaagtgctaggattacaggcatgagccaccatgcctggccgaaggaggctgctgttctaatccaggtactagcaaacggtggtggaccacagtccaagaccagcccactgcctgattttgtatgatcctcaagctaagaatggttttcacattttcaaatgattgaaaaaaatgtttaatgatattttgtgatgcatgaaaattacatgaaattcaaattagagtatccataaataaagtttcttggaacacagctgcactcctgtatgtactgtctctggctgcttttatgctacaatggcagaattgagtagttgggtagatttcaatcacgaagcctaaatttcttactatctggccctttacagcaaaagtttatttagccctgttctaatccatcaccaaatgctctgttgttgttgttgttgttgttgttgtttgagatggagtcttgctctgccacccaggctgcagtgcagtggcgtgatctcggctcactgcaacctatacctcctggattcaagggaatctcgtgcctcagcctcctgagtagctgggattacaggcgcacaccaccaggcctgattaatttttgtatttttagtagagacggggttttactatgttggccaggctggtcttgaactcctgacctcaagtgatccacccgccttggtctcccaaagttctgggattacaggtgtgaaccaccacacccagcctcttctgtgatttctaagtgtgaatctttactaaaggattccattgtcataaaatatattattaccaaaattgtcccatcacatactgtaaacctatttttttctataaataaatgactatatggacaacacttatcactaaacatgtttttaatgtttgccactgtggtcagaatattatctcgtgtccttatctgctaggtaggcattctttcccccgcgacagatgaggaacttatcagagaggttaagaaaagtgtccaggtttacaaaccaatgtcagccttgcccatatcaaaacttactgttttgttcaatagccttcctgtggaaactagccacccaataaataagtatcctatcagtattcaccaacgtttaaacttaattccatattatcaattttttggaataggctcttttcaatagaccagcatgttgggctattaatttcccttttagaaaaaaaaaaaaattgcagctcgctgccagcgctcatttaattttacataaacacattctttgaggctgaagcaaatctgattttcaatgtgaaataaaatacaataactgttcttggagttatttctaaacagaatttgtctctaatcctaatgtaagagggtaaagttaggaccgtcatctgtgagttatctcagagtaaacaggaaacaggttaaaacaaagtttagacgattgtctacacttataaatatttgttgattcaataagaaagtttctatgggctggtcgtccttaagctagttttgaagtctgtgaaaacagaggttattttttattttttggggatatgtttataaaccctttataatcgtattttccgctatcgtctaagacaagcttcaatatataccccaatcttatgaccacaaatttccttaaggccctaggggagagctcagtgtttcaacaccagttccaggcccaccaggacctccagggccccctggccatcctggcccccaaggtccacctggtaagtatcctctgccaaatctggtacatggcatcagacacacacaacaccctgactctcttggaaaaatactgtccccattataaggaaaaaaatgtattcattggctccaaaagagagcacagggcagtgtcttacctgataagcaagcaggctggggacttgctatagttctctgaggttatccaaattattctcactggtgcttctaatataaaggttcccgaggagaacctatgtaactacttaagaggaattttagagcagaaaaaccgttctggagttttggtgggggagcaagtgatgtttgcccactggcaattcatcaggatattttccatagcatcttcatttgaaaactgattgtctttgccaacgtgatctaaaactgagttttgcatgcatggagggagacttacatagttcaagacatctagaatatttcctgttaggaattaaattatattgacaaaattctttgcagttcctaaagattagtccattggatagggacagggagggggagcatatgattggggttgtgttaaaaattttttcttggccgggcacggtggctcacgcctgtaatcccagcactttgggaggccgacgcaggcggatcacgaggtcaggagttcgagaccagtctggctaacatggtgaaacctcgtctctactaaaaatacaaaaaattagccgggcgtggtggcgggcacctgtggtcccagctactcgggaggctgaggcgggagaatggcgtgaacccaggaggcggagcttgcaatgagctgagatagcgccactgcactccagcctgggcgacagaccgaaactccatcaacaggaaaaaaaaaaaaaaaaaacaatgtgcaaaagggataggacgacacagagaacttagacattttcttttaaaataagatgaaggaaagttgctgatgtggagatgcatatgtgtatttgtttctaaggtatccctggatccctggggaaatgtggagatcctggtcttccagggcctgatggtgaaccaggaattccaggaattggatttcctgggcctcctggacctaagggtaaatttaaaattttttcaaacataaagtttgttgtggatatttagaagatgttcatatgtataaataaaatgagtaaaatacaatatgaagatataaataggatataagatataaaatgagtaaaataggaaatatccataatactctttaaaatgttttctggccaggcgcagtggctaatgcctgtaatcccagcactttgggaggccaaggcaggcagatcacttgaggtcaggagttcgataccagcctggccaacatggtgaaaccccgtctctattaaaaatacaaacattagccgggtgtggtggcatgtggctgtaatcccagctactcaggaggctgaggcacaagactctgtctcaaaaaaaaaaatgttttccaagagccacaaatggaaaaaaatcttataataatgttaggtgaattaattgaattttttaaaacacagagaaaacaactagaaggaaactcaccaaaatggtaatagtgaatcttgattgtcagattttaaagacatttttgatacttctcagtaaatgcctgcacatttcacatgtatacatttcttttttttttaataagaaaggaactattaaatcacaaatggctgattttcccataaactccaaaataaattatggaaattattttcctttagggaaaaaaatgctgtttcccctcaaagaggaaacactccaaaaaaatctagacgctgagagctcacacaatgacataagcctgcccactgacaagtacatgaaagtcctgtccaggatggcatatgagtaacctgagtccctggattctcacatagaactgcaagttttatgacaatttcatgtttgttacaatattctttaaaatgtttgtcaaaaatagcatccttgttttggtgtttcagctcttggattagtatgtcatcagtgtttattatacattaattttgcccaaatatgagaatattgatttcaatttatgagtatttgaaatggaaaacataatctcatttctcctggagtcttaagaatggctttgagtccaatttcttggttttcttcctaatgatctgtgaagtaagggagtctgcctcacatttgtacttcattcttcttggaccctgcattaataaattacatccctactttgtaactctaggtattgactctctggaagaagactgttgactgtgggaaccagaactagcccaagagctccttgaaagtggagatttacaatttcacaattgaatctaatgaatcccatgaactaactgcaaattaaatattggtcaaattagggtatgaaggaactccctgaatgcagccttgcttcaccgtggcttcctcttctgaaccagagatcacagaaagtgtgttgacccctttctcaagtcacctactataaatgcataagaagttaatcccttgcatgcaatggatgctatagggcattaagacttaattctcttaagcaacccctgttgagaaaggctacctggggtgctgaaaacgttctatatctttttttttttttttgagacaaagtttcgcttttgttgcccaggctggagtgtaattggcactatctcagctcaacacaacctctgcctcctgggttcaagcgattctcctgcctcagcctcccgagtagctgggattacagacatgtgccaccatgcctggctagtttttttgttgttgttttttttgttgttgttgtttttgtatttttagtagagatggggtttctccatctccatgttggtcaggctggtctcgaactcccagtctcaagtgatccacccaccttggcctcccaaagtgctgggattataggtgtgagccatcatgcccagccaaaagctttgtatcttaatctaggtcatgcttacatgaatatatccatatataaaaatccacttacctgtacactgtatgtaaaaaatacttcaaaaacaaagtcaaatggtcaaccagcatcagtggtttgaagaattgctgaatcaaaatcatggccctactaaacaacaaaatagagaaagttattttttcaaataggaaccaatgtaatttgatttggaacttttaaaaaattgctaatttatcagttggttttattatcatttaaattttcataaaagcatctctagctggttgagagataagagagttactgctcagaatatttcaataagactaatcctacaacaatgtttattgttttttctctgtaggagaccaaggttttccaggtacaaaaggatcactgggttgtcctggaaaaatgggagagcctgggttacctggaaagccaggcctcccaggagccaaggtatgcaaaaattcaagctatcacagaagagagggtgggtgaccattaactggccagtttgtatgcacttatctggcagagcactctagatgtagaaatgatcaatatatttgtagatgatgaagatattaaattttttaaatgtttctctggatcatcttccattttagaaaggaaaacataaggtgtcagaatgcagatttcatcgtgatatcatctttaatggtttcataaataatcagagtatttaaaatgggacaactctagaaagaaatgtggttagctataagaaaaactatcaaaagtaaaaacatctagatttttctctttatagacaatcccacagtcttctgaaaaagtggaggctacatatcctgaagtattattaaacataatcttacagaaaagtcagcaactagagctcaaaaaggaaagttgatgacatggtagtggctgtgcaacagggacttagagcctccataacagagagtcaatatcagtgaagatttggaagcactatatagtaataacacaatttctatgctgtagggagaaccagcagtagccatgcctggaggaccaggaacaccaggttttccaggagaaagaggcaattctggggaacatggagaaattggactccctggacttccaggtctccctggaactccaggaaatgaagggcttgatggaccacgaggtacaatagcaagtgtcattacttttctccactgtgagctctgctaaaatgcagcaaactgaatgtgaaggtgttctaggcatgaagaattctcccatccaatgttcctgccctacctttcttccttctttccttcttccttccttcttttttaatgagtgccctctagaaaaggcatattaatggcagtaaatatagatctgatttaggtggaaaaaaagttaacagaagaatgactggtacagcaataccaagaccttaagttctagcacctgggtatatacttgtgctttcttttgcaggagatccagggcagcctggaccacctggagaacaaggacccccaggaaggtgcatagagggtcccaggggagcccaaggacttccaggcttaaatggattgaaagggcaacaaggtaggaggagggcctcaaaactggccaccagaagggcaggagacatgagactcctgctctgtgctttgctgcttaacatgggaactgtccagccacaagtcctgaccactgttcaatgagaaatacttcagaagtgtaaaccttgctgttatgggtttgttgcacacagtagtgtgtaccacctataaaggaagaaacttgaagttaatatagtgagttgctttgtgtcttttatgcaagaaaaatatgaatgctgaagacagagattggtgtgtgtttacatatatttatatacatattaaattctcagaaaacattttacctttaatattttcataaatatattaaagtggtaagtttatccttattattaaaatagggtaaatgtatgcaatgataccagtttaaaaacttataaactaaaatatgtagttgattgttttacatacaatataaaagaaaaaacatgaaaataaatctaaatgatgcaggctagatgttccagatgatggaaaactttgtttttggatcctctcctcatcagatctgatgaactgttcctggaaaaatgtatttagaaatcagttaatgtctgtggtctatcatactgcttatatgttcacaaataaatttttgaccaagaccttaactgttacagtggcattattattttttccagaggcatccagtggcttacctctatgcgaacggctctgtatgtcttctgcaggaaacagagtgagcagcactcataaggtgcagtcccagaatgtgtctgcaggactagaaaatagatataaagactacacttgtattactgcataaatcattggagcagagaatgttagagccagaagggagctcagaaattttacagaggggacattaaatacatacacacacacatgcgcacgcatgcgtaagtgtgcagttaccccaaatcacaaagctaaatatttacagccataaaatatttctaaagtggccgggtgcagtggctcatgcctgtaatcccagcactatgggaggccgaggtgggcggatcatttgaggtcaggagtttgagaccagcctggccaacatggcaaaaccccatctctattaaaaatacaaaacttagctatgcattatggtgcacgcctgtagtcccagctatttgggaggctgacgcaggagaatcacttgaaccagggaggcggagggtacagtgagccgaaatcgccccactgcaatccagcctagaagacagagggagattccatcttaaaaatatatatatatatatatatatatatttctgaagttagtaggggaaagcatttgtgggttaattaattcattcatttattcgtacacaggcagaagaggtaaaacggggccaaagggagacccaggaattccaggcttggatagatcaggatttcctggagaaactggatcaccaggaattccaggtcatcaaggtgaaatgggaccactgggtcaaagaggatatccaggaaatccgggaattttagggccaccaggtatccttttgtgtgtttctatttttcttcttatttcttcttcttcttaaggtggctctgtcaactgtacataggcatacgctttttactctatgcttttacttaatataaggttttccttctaaattatttgtaagaaaccaggggccatggtgcagggaaacggtggcggcaggatgaacaattacccagaatgtggctatttttgctgtgtaatcctttttatatacgactactataatatacttgctagtattttgttgagaatttttgcatttatattgagaagggatattggtctgtagcgttcttgtgatgtctttggtgttggtgtcagagtaatgctggtctgatggaacaagctgggaagtgtttcctcctcttgtattttctggaacagtttgtgaagaatcgacgctctttaaacatttggtagaattcaccagtgaagttatctgggtctgggcatttctttttgggaagtctctaaatgactaattcaatctcttcatttcttataggtatattcaggttttctatttcttctggagtcagttttggtattctgtttctctagaaacttgtccatttttataagttatctgatttgttgttgttgttcatcatatttctgtataattgttttaatttcatggctatgtttattgtttatatgtttggggagaatattctgttccctcatggcataaggacctcaccgatctcccctctggaaaagagcctaaaacaacttaatcgacacattatcctttcattcatgttattgggctactatcacatgccagcattcttctaggccctagagacacatcagtcagtggacaagtctccccttctcatagtagaggatcaataatagaaatatttaaaatctaagttcaatttgagacaagtgttatgaagaaaataaagtgaagggatagaatagaaagtgactggtcaggggctgggaggatggaatgctccaaaacttccacatatgctatcctcatccatgaatatgatttgctaccaatcacttccacataggtgagtttaaaagaccacttaccgacccatctcctagactaatacagtaattgtactatgtacagaggccattttttcaactcccaatctctgcttctaagtataatttattttagtatatggaatattttgcttttctcactctgtacaacacgtgctgctttgtgttaatttgtttccataggtgaagatggagtgattgggatgatgggctttcctggagccattggccctccagggccccctgggaacccaggcacaccagggcagaggggtaagtgatagagtgtctttctaaatagcaggaagcataaacaatgttcatttattttgcagcaaaaaaagttatgtttcattggagggaaaaatagttctgagagagcaacagtatttgattttgctgttttctatgttccttttctccatttgaatggaatcctgttttctgtaggcttacaccactacccttatgaggctgcctgcctggggaaactatttatcaagttctcagcactgttagccttttttgtttgatttgttctgttttatagtaagcactgccaactttttaatccctatgaactacctgaagaattaaggacctgatgttgttactcctgtctgttagggagccctggaattccaggagtaaagggccagagaggaaccccaggagccaagggggaacaaggagataaaggaaatcccgggccttcagagatatcccacgtaataggggacaaaggagaaccaggtctcaaaggtaaagaattgcttgtttggaatcaggacatcagagctgattctcaggctaataaattatccaggcaaatccgtttggttgacaaataaggacagtgagggccagtgtttagttacctgcccatcacacagccggttggtggctgagcaggccttagaactgagtcaccttccacgacatgttgcctcctcgatgtgtaacatttttatttctaagttaattctgcattttaatttgctatatttaaatcatcagcagtcagtttttaaattataagcctcaaaactccctctttgccaagtatggggaaaattaaacccttaaaaaaattccacattaaaaaacttttctggctgatgttgaaacctccatctcaaattcaactttattctgtagactaccagaataatattttctgattctatctaaaaacttcttctcctgttcaaaatcctttggagaataattactaaaaagaaatgcttcaatgaaaatttaaccctttagaaagactgttgttagatgtggctactaggctaaaattcaaacccattcacattatttcaagttatttgggccctttttatggcagttttcatgatatgatcaatacgaccaatataaaaccaaattttcagaagccctcccttgcagtcttcttgaccaaatgtaatcccaagcaactttagaaaaacagagaactgctgggtaaaatattacatttgcagatcagactctcatagcaggaaaggaataaaagaaaaatgtatcatggcaagaaaggaaaaaagaaaaatgtgtttgcagttgcaaaaccatgttaagttttgagatatttgaaatgacttttgagaaatgagactgtgttcaacaaatatttatatgcatggcacatgaggatgtaacaaaccttcacatgtactgccaaacctaaaaaaaaaaaaaaaaaaaaaaaaaaatttgcacagggtgctgtagactacaatataaaggctgactaactggcaagttaggaagtaaaggccttctatgtacatagtcctcatctaacctggtgttgaagagacactttagttctggtacaaaaagaatattgcatttcatttttagcaatgaaaaagaaagtaatgcgacttttataaaactctgctaggactagtctaagccaagatatgaaaaaaaaaaatactggcaccaatctccagtcctcataaactgtctgcatagacaccacttcactagactattttagattatttaagtagtgttagaaacattttggaaaaaatatgaatagcatatctctgcctacataagcagaaatttggcgctcacagtataaatgcgcagtgagtactaatttgcaattgaagaattccttttgtaaagtacagaaggacacatgatatggggctatttctatacttccaacaaaactcttttactcaccctaagtacagtatgcatcgaggctgttctgtatgttttctttaggcttttcaaatgcataaccaagggacacagattgaagaacaacaaaaaaataacctgtatctaggcctccctaatttcaatatgatccatttatttttctaaatctgaatttctgacttaaagctattcacttcaaatgtggaagagatattgaatatacagagaagcacaataacaagtcactatcctctccacaaggaggctgcgtggcagacttaggcatatgtagaaaaagataataaagacgcgaggtgcaaattagcatgctatattatttaacaacgacctaagtagcatttaccatgtgcaggtactgttccaagttttacaactattgactcatttaatcctcacaataaccctaggagtaggctgggcacagtggctcacggctgtaatcccagtattttgggaggccaaggcgggtggatcacctgaggtcaggagttcgagaccagcctggccaacatggcaaaaccccatctctactaaatatacaaaaattagccagggtgggcggggtggggagcctgtaattccagctagtcaggaggctgaggcatgagaatcgcttgaacctgagaggcagaggttgcaatgagctgagattgtgccactgcactccaacctgggcaacagagtgaggctctgtctcaaaaaataaataaatacataaccctaggagtaggtactactattgcaatcatcccattttacatacggggaaatagggaggtcaagttacttgcccaatgacactctgataggaaatggcagagatgggcctcactcttggcctcctcactgtgctgccagagctctgtaggagttgagggaagtagaaaatacagcaactaagatagtcagtgaaacctccataaaagaggacttaaatgttgaataagattcagatgaacaaataaaattcttggcttaaaatctttccaaggctccctgtgctttgagaagtgaaacttcttggactgacatacaagtttattcaccacttgcacttggcctgtctctccagccacatgacatttatgtactcaataattaccttttacttaataatacctatggactaggcattttgctatgccttgattatacagaggtgaacaaagcagactttagtttcctagtcatgatgaaagttacggtttagtgggggaaagacacataatgggtccataaacattttccatttaggctaggtagtaagtatcttacgctttgtggctcacatatggtccctgttgcatattcttctttgcttttgtttttaacaaccttttaaaaatgtaaaaaccgccaggcgtggtggctcacgcctgtaatcccagccctttgggaggccgaggcgggtggatcatgaggtcaagagatcgagaccatcctggccaacatagtgaaaccccaactctactaaaaatacaaaaattagcgggcgtggtggcacacgcctgtaatcccagctacttgggaggctgaggtaggagaatcacttgaacccggaaggcggaggttgcagtgagctgagattgtgccactgcactccagcatggcgagaaagcaagactccgtctcaaaaaaaaaaaaaatgtaaaacccgtctttaaccctaaagccatacaaaaccaagccagattcagcctgaaagctgtattttgccaactcctaaaacactgaagtaaacaaacagactaaacagtatatatctttttagattgcaatcaatgacataaaaggaaaaaatgaaagttgtaaaacaaaacaatctaactccctgatactcatcactcctttctacatgctattttactctctgggaatcctgtctcattccagaccttcttcacccaattagttttcatttggtcttcaagactgagctaaaaaataccacctctttcagaaattcttccctgtagtatattgtgcccaactctagtatagagtttatcttcctggatgataattatttgtttacttgcctgtctccccagttaaacactaaaaacctggggaaagagaacatgatgatttatctctctggtgctcagcacaagacctatttattaattagatgctccatccatatgtgaatgaataagtacatatgcaggaaaagagccaagggaagtgaatctgcttgagaaaaagcacaaaggcaggctatagacagattgcagaatgcttcatgctgccgaaagagtttgcaatttactctgtaagtaatagagattcagtgactatttatttatttattttgagacggagtctcgctctgtcaccccggctggactgtaaatggtgtgatctcggctcactgcaacctccgcctcctaggttcaagtgattctcttgcctcagcctcccaagtagctgggattacaggtgtgtgccaccaagccagctactttttatattttttagtagagacagggtttcaccatgttggccaggctggtctcgaactcctgacctcaaatgttctgcccacctcagcctcccaaagtgctgggattacaggcgtgagccactgcacctggcccaatgactatttatgaacaggagaagagtatgatcaaagtcatgttttagggaaagtggaatggtttcctgggacgtttatgagctttccagctgggcagaactggattcaaatccaagtgttattaactgattgacactgtgattctggcctttgacttacctaatactttataaattataattttaatacatggattgagaatagaatcatctagatgagaatactgtagtggataacactttgtctttactattaaaaaatgaagaggtatttaggctgctaattcttaaaatgttgttttaaagagtacatattaagatcattgctagtgttcattgaggaataacttatgccaggcactgtgctaatgcttgacacatattatttcatttaatcctcttctttaagagacagaagcccaaatccgcccatgctcttaacatatatgctatatgctgtactacagtaatatgccatcggtttaaaccaggatgtggatgggtctgacaaaattttaacatgaatttttgatgcctggttttttgttttgggtttttttttttttttttgagatggagtctcgttctgtcgcccacgctggagtgcagtggcacgatctcagctcacttcaacctctgtctcccaggttcaagtgattttcctgcctcagcctcccacgtagctgggattacaggcacctgccaccacacctggctaattttcttgttaatacctggtttctaacttcaggattcgcaggaaatccaggtgagaaaggaaacagaggcgttccagggatgccaggtttaaagggcctcaaaggactacccggaccagcaggaccaccaggtacagctgattctcaaatagaaaaatatcacattttacactttcctacatctaaagtaataaaagttgtttctaggcttactgggtttaaatatcaattctgttctgatagtgttccagcagaaatttgctactaaattaactaaaagaaggtgttgatagttggcgtgtcattaactaacatacattaacctacaaatagttccattttgtcctcaaaatttcattctgaaattgctgatatgtattataaattataatgtatcactatatcacatatcagagatgaaaattagagaatgctttagaagttttcaggtttgcatctttcttttttaaaacaagtaactgagtttacaaaataatttttaaataattaaagtatcccaccattcctacaaccatctcagtaacaaaatatatgacatggcaataacacttcaggatgcagttggaaatgtattaccatatgtttgcaggagcccacttttttcccgctggtgttggtcctaggatgattttagtgtttgaaacccaggtctgctaacgagaatctaactttctttagttttccatgttccaggtccctagttccctcttatttgaaggaaaaaggacagctagacaagtgcccaaaccagccggtctggctgttctgcattcattcatgcatgcaagcaacaagtatttattaaacacatactatgtccaggaactgtgcagggcaataactacttatttgttctcaaggccccagaggagatttgggcagcactgggaatcctggagaaccaggactgcgtggtataccaggaagcatggggaacatgggcatgccaggtaatgcataaggtcctgttatgagcccacaagctcatgatgggtgaggactccagattttctgtgttgtgtactgttttggttttccacttggtagaaagcttatattaaaaaactagatttgcggggccgggcacggtggctcatgcctgtaatcccagcactttgggaggctgaggcaagcagatcacctgaggtcaggagtttgagagcagcctggccaacatggcgaaaccccatctctactaaagatacaaaaaaaatagctgggtgtggtggcacatgcctgtagtcccagctactcgggaggctgaggcaggagaatcgcttgaacccgagaggtggaggttgcagtgagctgaggtcacgctgctgcactccagcatgggcgacagagtgagactccatctcaaaaaaaaccaacaacaacaaaaaaaacagatttcctattagacaaatacacagtgtgcaaccagaaaatgggtgagaacaaaataaatattgatattatataataatcatctattgtaactacctgatgcagttgcaattctgaaaaagccattcttgggagaaagcttatgtaaaactgaaaagtagaaaacttcaagatcctcatgtttatctattttactctatgttttccccctaatttcaggttctaaaggaaaaaggggaactttgggattcccaggtcgagcaggaagaccaggcctcccaggtattcatggtctccagggagataagggagagccaggttattcagaaggtacaaggccaggaccaccgggaccaacggtatataggccactgaaatatttacattttagtggtggagtgagtgccttgaaaaatatcaacaagtacccagattcggtgtgggcagagaaaattgaaactgttactatactttcagacagttatttggatttttaaaatcctatctccacaacagaggatgcttgtctgtcacagagctgtcaacttctgagagcctctttcagtcaccaaggaatttctcacactgtctctgcaatttaggtgtgctgccagaagaaggcagtgattacaggcccatacaatcagataggacagtgggttttttcttgtgatacaaagtggcccatttctgctgtactcatctcagacttataaaaataaatttccaaaccttctaataaaaaacacttgtcggccgggcgcggtggctcacgcctgtaatcctagcactttgggaggccgagacgggcggatcacgaggtcaggagatcgagaccatcttggctaacatggtgaaaccccgtttctactaaaaatacaaaaaattagccgggcgttttggcgggcgcctgtagtcccagctacttgggaggctgaggcaggagaatggcatgaacctgggaggcggagcttgcagtgagccgagatcgcgccactgcactccaacctgggagacacagcgagactccgtctcaaaaaaaaaaaaaaaaacaaaaaaaaaaaacaaaaaaaaaaacacttgtcttacaaagactaacaaaagatacaaaataaaataactttacagcatcattagaaagcgaacaaaatcctaagatagatacatttatctttcttgttttagaactttttctgtgtaatggaatggaaatgcttaatcttgtttcaatgttttcagtgtttgtgctttgtcaaattgaggttggatgttaaagcccttactactgtattatacaaagcagcaaccagatgtttcaatagggcttggctgctttcttaggtttattctcttcccaattatctgagtacagctctcacactaaaagccagagatagaccactagagaatgattaatagaagttcctataagcagaagttgctaacgtgggattccatggaccactgggaaaatctatgggatcccaagaagcccagcaacctcttgaaactaaatgcaaaatgtttgaaaatgtttttgtagggtagagtctatttttcagatttagatttttagattttcaacagtatatgtatgactccaatatataaaaagtattacttagggaaccttctccctctttttggagacaataaaataccacctttcctaaatatttccaccagctatagtctccagtagtaactgctaaaacaagaaaaaaatttagacactacacagacccaagaaagcaactgtttactacttggagcacagacaaatgtctttgttctttatatttagattaagtcctcagaaaacctgagattgcttccactgagatatttgctcaacgaaaaatcctatttgacttcacactcaattaactgatagtttcatttagatttaaagttttcacaggtaaccaccagaataaatttttagaactgtgcattgaacacaaaatgagctggttttatcatgtcagcaaaatgagagtaacagagtagtatattttaattggctaccatagaaattttgtaaatctttatcaaacctatatgttcgggtttgtcgtaaaactgaagtgaagatttaatgaacactaaatcattggaaggtttttaaaacatgtgattgacatatgtgcatgcatagcatttgtaggatacatctttatttagtctatttctttcttactcccagctactcatcacaatttgtaactatatatttgtgtgattatttaatatctatctccttactggtctctgaagctccatgaaggcagggactgtgtatgtcataaatctatataggttaccattatatcctggtaaaagctggcttcctgggtatgctaccagtgcagtcacagaaatcctgtgctaagaagggcctccacacttggtctgacgctatgctgttgctgtcttgaaattcactttaaaaagttttaagggaaactgcattttcattttgcactgggccccataaaccatgtggccgtcttattcccagcacctatcacagtgctggcagatagcagatactaatatgaattgatgaatgaatgaaaaaattagtgaataaagtttatgctgaattcttaccacatatcctgcttatatgagaattttaaaggtatttgactacatttaagggggatccaggactgccgggtgatatgggaaagaaaggagaaatggggcaacctggcccacctggacatttggggcctgctggacctgagggagcccctggaagtcctggaagtcctggcctcccaggtaaggcttgagtttacaattctaaaagctggaagcattactcagagtatagccctcctgaaatcattgtggtaaacagaaagctatttatacttttatgctgcagttgcttttattcaactttgaacttcaaattctaacacactaagagaattcattaagagagcccaattttactaatcagcccatttggactgaaatacaaaaatatgttcctataaaaaacacttttgaagaactgcctcaacaaattcagcccaaggatacaaaatgttagccgttatacaatcataatgtttgtattagtttgtccaggcttccatagtgaattccacagactaggtggcttaaactacacttgatgttagccaaaaggctgagaagtgattaggtggcttaaactacagatgtttattttctcacagttccagcagctccgagtctgtgatcaagctgtcggcagcgttggtttcttgtggggcccctgttcttggcttgtggatggctatcttcttccagtgttttccaagtgtctgaatcttcttttcttataaagacaccactcacattggattagggcccaccctactgacctcattttaatttaattacctgtttaccagccctatccccaaatacagagtcatgttccgaagtactgaaggttaggacttcagcatatgaatttggggacaacacaattcaaactacaacactgtgctgtgactctttttcgaacccatttctggattgaattttggctttctggcttattagcttacaattcaggtttagggttttgttttattaaaaacaactgtgaaactatcgggttgcagattcaggtcttacttaaatacaataaactacctgttcaaatacagaaagtttcaataaatttgcatttaactcgcaattaaaataaaatcgcatattgagtggtgcttgtggttggtgtacacacatctttgaaagtgattagacacatctctgcactggttctccaggaaaattgcagcctggacaaaatcatggggtgaccttgcaacaagagagcttccttaaggccagcgtgagcatggttgactataaaaacagaccgtttcagtcactgttgtaatcatttatcttttggtgatcttttttcttccttcccctctcttcatttccaggaaagccaggtcctcatggtgatttgggttttaaaggaatcaaaggcctcctgggccctccaggaatcagaggccctccaggtttcatttttgtactttctctttttccttttcatgtgggagacacattttctcctgaggtttggatttctgtaaacctactactctatagaaggtagctcctagttactcagtatccagacaaaaatgcaaaaaaaatggggttagatatttctatctatttaattcaaatatttggcaacctattccaaactgataatcctcatgataatagtaatctgtatgtggttttccctgggaacatagcttcacatagctacagttctgaaaaacagcctgtttaacacaattccacacatctccctggtattcccattaggccactggcaagaaataaatcctctttttgtataccatagtttggggtttttgggttttttttttttttttcaggtcttccaggatttccaggatctcctggaccaatgggtataagaggtgaccaaggacgtgatggaattcctggtccagccggagaaaagggagaaacgggtacaacttgctcattatctttgatccgttagttttattttggatagaatcattagtaacagtgtaatcctttgctgctctaaagatttttctctgatagaactgattatctttaacatgttttcggtgtgtactaaacttttctcatagacatataatgtaatgaaattgaccaattattaacatgccaagattatctctttcaggtttattgagggcccctccaggcccaagagggaaccctggtgctcaaggtaagcagttcttcttccctgtcctaatgtacacattttcaaggagagaaagcagttgaatatgcttgaaatataaagtaagcttaacctagtgaattaaagatgttccaatagtaatacaggatatttatcatcttggtcttcaatttaaaatgtttaattattaccatcacaacaaatggaatgaattagaaactgtgattcaattttggaatttcctactaagaaagtcttgaaaagtaaaaaggattcttctgtatatgtcttgctgttgttagcatggtttaaagataccacctcctaaaaggtgaaggtggaactgatgggttctcagtaagcatctgtccctgctgttctgagacacaggagtaatccgaatcctttcccacctgtatcttcataggtctgactccaacccccagatccagcttgcggtccatgctattgtttattaaaggcgacccagagagtctctcaacatctcagacatggcagtttactgaacatgtcattcagagtatttacaagttttttgtttggcaggccacagatctggatttctcatgtcagtgctttacaagataaacagcttcttttaactcttttccattttctagtcaaaccttccaggagaaacatcagattgtttgcacatttcattgacccgtctcagccacgcgtcctatgaatgggagcatttcattagcaaagaggcctaacacactgaagggctctagttattgatgttcacgcaaaccagcaaagagcagctggatgccaatgagaaactcagttgggcaggaaccacctcttgacaaaacagttaaagtgtaaaagtagacaagagctgttctctcccatttgtttcttactggtttgattgttctttcggttgagctcagtcttcccacatctctcagacctctcctttcccaatgaggatgaaggctcttcctgttccacagtgtagctttagaattttggtcaaaaggagagttgctcttcatgttcccagggtaactcacagtttaaccatttggaatgagaacactagcttttaactggaaataaaatttggtataaaacggtcataccttaggtttaaaagccttaaaactaacaaatagcctaattatgtaagtgaatgattatgcacctcaatccctctaggataactaaatatggagaagagttcattgagacttggaaggtatgaatccttttaattagtttattctcccaaatcctaaaaagaaatcatattgcagagcatgtaatcattttaatgaacatgaaatatataatccaagccatcttggtacttcaggtcattgccatgcaaatacagtattacaaagcttggagtgaactgaagtcatctaagcactttcttttaaaagcataaattacaggcattaaaaagctaaaggatgtgaatagacatagggctagatcgtcaatattcatcaattttattttcattgtaagtctttactatataataactccccaagccctcccctgagctattagcctccctctccttctccctctccttctgcacatctatcttccgttttcatgccatttactgctgctagaataacacagagatgggagagcagagggagacattatttgcaattcatacaatatttttcattcatgaatgtcaaagcacaatttcttgaaggttttctaagatgaaaaatattagtattaacctgtgacctttttggagggtctttggtaaatccaaacctcctgccactagtattcctattatggggaatgtgtggggaagttaactaaaggacagaataaagactgcaattttgttgctcctttgtctggatttagctggataatacttcaaatgcacacatcagtgctacgcagtttagcttcttatgctctaatgaattatcagtgactcaacaatgtcaacatgactaagttaatcagctgataataactggcttatatttatataacactttagagcttacaccatgcttttatgtctgtatgttatctcacttgatctgaaagaattagctagaacaggtattaccttcattttttaaaataagaaaatcaaaatttgtaatagtaggtaaatctgaagtgactttgccaagatcagacagctagttggagacagactgagtctcaactcagtttttgtagctctatattgcatttaccagcaatatattataaaatatatattttagaaacatatattctgaatctgaacacttttaagcaaagtacctacattattaaagatagtcaagaactctaacccaagcatatgggcattaaagaaacttattaagccttcttctttgcaggagccaaaggagacaggggagccccaggttttcctggcctcccgggcagaaaaggggccatgggagatgctggacctcgaggacccacaggcatagaaggattcccagggccaccaggtctgcccggtgcaattatccctggccagacaggaaatcgtggtccaccaggctcaagaggaagcccaggtaaagggtttacttttaaacagcataaaataacaaaaatcatgtttgacctcaaaagttttcaacctcctcctcatgttaccttgttgcttcttctttccctgtggtcatctccattcccccactacctgtggttcccatacccagcagttgtcaaggcaaggtagcctgtttgagggatgcatagttaataaattaacgagcctggctggacgcagtggctcacacccgtaatcccagcactttggtaggccaaggcagacggatcacttgaggtcaggagttcaagactagcctggccaacatggtgaaaccctgtctctactaaaaatacaaaaattagccagtcttgcttggtggtgcatgcctgtaataccggcaactcaggaggctgagatgggagaacctcttaaacctgggaggcagaggctgcagtgagctgagattgcgccactgcactgcagcctgggcaacagaacaaaactgtatcaaaaaaaaataattagcctaaaagacagtgatgcattcattcaactctatttgttgaatccctagagctgggctaggctctagggaagcaggcacagaccctgctgtaacagaccctcactggggagaagcagatcctgctggtgggtgccaggtgcttcgctggcatcatcttctcctgtctttaccacaatcccatcacatgctccaggggaaagaatgtttgtggcaatgctaagtgaagggtttatacttcattagaaacaatcactgataaatagaaccttccaagctccctggctggcaatactgacagacttttcatgaattcaggtgcgcctggtccccctggacctccagggagtcatgtaataggcataaaaggagacaaagggtctatgggccaccctggcccaaaaggtccacctggaactgcaggagacatgggaccaccaggtcgtctggtgagtatggataattattttgactcattattaattcaatatcaacttataattattcttatattgtatattatatcatatattgttgatgttaactgtattagtccattctcatgatgttaataaagacatacccgagactgggtaatttataaaagaggtttaattgactcacaattctacatggctggggagacctcaagaaacttataatcatggcagaaggcacctcttcacactgcaacaggagagagaatgagtgccaagcaaaaggggaagccccttataaaaccatcagatcggccgggcatggtggctcacgcctgtaatcccagcactttgggaggccgaggcgggcggatcacgaggtcaggagatcgagaccatcctggctaacatggtgaaaccccgtctctactaaaaatacaaaaaattagctgggcgtggaggcaggcgcctgtagtcccagctactcaggaggctgaggcaggagaatggcgtgaacccgggaggcggagcttgcagtgagccgagatagcgccactgcactccagcctgggtgacagagtgagactccgtcaaaacaaacaaacaaacaaaaccatcagatctcatgagaactcactcactaccatgagaatggcatgggggaaaccacccccatgattcaattacctcccactgggtccttcccaggacatgtggggattataggaactacaattcaagatgagatttgggtggggacacagccaaaccatatcattaacattgacttatcgttagtacaagagtactattatactcttataaattaattgccagatcagatgggcctggaggcagcaaaaatttacaatttttgatgcatctgtgcagtgtgcctaagggaacacagtccagaagtttctgaaaatcaaaaaatcttcagagttggaatgatttggcctctaagaggcctccaaaactttggtctgtatgggactcacctctacagcattccagatccttgcttatttagaccctgaacaagtccagtgacggaatcttcaaaaagcagctgggagttcagaatcactctaaatgacattgtcacttttccctctacttacaggcttctgaagatttctgcattcccctgtaaatgcctatttattttctgccccccaaatgcctgccaatgtttctaaataactgccatttctttccaattattttattcctggataaatacttggttctttcaaattcagtttaactatttatcagccttgcctctatactgaatacaccctagtttcaatcgccctaaaaaatatagcctctggaatgaacgccctccagaagtaagaagtcaataccccagtgagtggctaaaggacagaagggtctactgtccggaacatcaccattttaggaatcagacctaaaattccacttgggccattgggctgacctacctgtctccacattgtgcctgtaatcaactaaagcccatgggccttttcctcatgaactgctactaagttttctccattatttcttgcctagcttgttgttgctgatgtttatttgggacttaagtgtagaacttttacatttatcaatcttagacatcatcttattcatttaggcctgtgccccaagcctgcaatctctcaattcatattctctctctcaacaccacagccgtcgtccctagctttctcttagcagcgtattagacaagttgacccctctgtttacatcaaatccttggagacagatgttgaatagatgaatgtgactcagggatcataactgagtgtctactctgtaccaatggatagaaaaacaaaaagctacagtcccttgccctagaggagcccacaataaagtgagggtgatagacacagagacggccattttcacactgtgtggtaggaagaatgcagggggctgtggggacacagaggaagggtatttaatccagactgtagagggaaggtgttcaggaaaggtccctccccaaggagattgatgcctggcctgagtcttgaaagacgcataggagttatccaagaaaataggaaaagccggggtatgggtcgggtggaggaaaggagctttctgagcaaaatgacaatgggtgtgtgtgagtgacacacacacaactctattactggagctgaggtgggaatgaggacaccttgggaggagtctggagggctaagcaggagtcaggtaacggaggtctggttttctagactaagaagagggaggaggacatcacttgctgatccaagaaacacttaacaaagcagctctttgtgcccagagtttgctctctaccagctggaattaatcccttaatgaactgccttttgatgtggctattcaccaagctttaaatctatccttgttgctctatgcagcagccattttgtccacaaaaatatagtagagagagctaccatggcacatggcacagctctctctaccatgtaaattgtcagtgtaaatacattgacaattcatatgtaaatacagaacatctatggtataactcattttgtcctctactaacctcatcagtgatgcgtaatgaggtgctttgccatagctcattgttaggaatcgctcttaagtactcttggtatttgatttccagaatctaactttaaaagtttttttgaaaaatgacatatttgcccatcttcagtctgtaggtgtctctcatgttctccatgattctttgaaagttgccaatttgatccatgattacatctgaagaccttccaaaggacactgggatatataaagcttggtttggaaacatgatcttacttaactcctctggtgatttcgtggtcattcataggcttctatacttacagttgaaagatatttcttgatggatgtctcaactggcctggggcctttaacagctccctcctgctgccagggataaccctggcaacatgccctttttcatagttaccttagcctcaagagaacaggcagacatcagaagccagcaagtccttgaccagatggttctgttttgtctctctccttttttaacaacactttatccaagcaatcagatggttccttctttggtcttcttgctccaaagatagctggttcaaggccagttttatccttggcacttttcatgaccttcaaagcacattattctcaggtaatagcattatctcaattcacatggacagtatgaaagtagatttagcatacattttgacaaatagctctttccagaagccctgctccctcctccctccttctatggctttgcttgagcatctcctggctataagaccagttcatgtgagcctcacaagaagagagcacctcgttcctgcttagattattgcatccttgtcaaatatgcctgtcaaatactctctcttgacaactcctgtacactcccatccctagacattacttctcctaccatcatgatcaagtgtaatttatggctctgctagcttagtgagaatgaagcttaggtgctgtaactcaacaacggttttgttgtctttgcagcaattataaatacagattataattttcattctgggccaggcatggtagctcactactataatcccagcactttgggaggccgaggtgggcagatcatttgaggtcaggaggtcgagaccagctgggccaacatggcgaaaccctgtctctactcaaaatacaaaaattagccaggtgtggtggtgcatgcctataatcccagctacttgggaggctgaggcatgacaattacttgaatgtgggaagcagaggttgcagcaagccaagatcatgccactgcactccagtctggaggacaaaacgagactctttctccaaaaaaaaaaaaaaaaaaaaaaaaaaaaatcattctggcagtactgggctactccatttaggacacagaatatccagttgaatccaatactaaaacaacatacaccaacattagaaggtatgtttgctgttgggcttaagggaagcttttgttttacttttaaaacgatagtcctaaggaaaggttctaagtggccagaggagttatagccttgattgaaagataaaaatgatgtctgctaacttcagcttattctcacccaacataatattataccctatttgcatttttaaaaaactgctgtgaattgagtgattttaaaaatttgttttggttctgctccctttatttgaaatatagggagcaccaggtactccaggtcttccaggacccagaggtgatcctggattccaggggtttccaggcgtgaaaggtactgtttttgtgcattgctctttatatgcaaataccataacctcaattcatattttagggcacacaagtgtttgctgaagtacagacagctggggttagtacaaataggacctcaatacgagtgaagtaggaaggctccactacactatttcaagattctttgaaatagagtatttcttcagatcaatggctctcggtaaccttcttttatttgtgtaaaagactgtgattggaagagaagtcttaccactttattagttcacatcaaagcaaatattctctatgtgctgaaaagaactcctaacgtaactaactctaggctattagtaaagctagagtaataagctgagaaagtaggtaactatgacaaccaagcaatataattcaccacatggtagaacaggttttaatgtgactttgtatgttaccgtaaatatcaaattggtttctgaactcaaaaagtggactcttagggacccttccccttcaatgttaaaatacaagttcttaatgcctacttctggaatatatttctttacagactcattaagcatgacctactgggtcccagtgacatgccaaaacctatgtgaacaaaatgaaattgtagcccttgtgacagaacccataggacagagcctccaggcacacttctagtatttgtccttagagtcaatcatcaacctgaagaactaggaaacccattgatctaagtggaatcacactgtgtctttgtttgtttttaggagaaaagggtaatcctggatttctaggatccattggacctccaggaccaattgggccaaaaggaccacctggtaaataaacgtccttactattgctgtcaatgaagaaaggtaacacatccgtgaggccatcatcttcttcttatgtttatgtcaacaggtgtacgtggagaccctggcacacttaagattatctcccttccaggaagcccagggccacctggcacacctggagaaccagggatgcagggagaacctgggccaccagggccacctggaaacctaggtgtgggactggcagcattgacttggatcactaggaagtggttgaaccaaaatacctgtaaactgctttggaaacagctgatacaacttcacagaaaatgttgaacatgatagtggttttcacaatcagtcttaggattgagctcattttacccttgaccagcaaataaaagaccttggaatctattgaaagcagttgttcatagtataacttgaacaaatacactttagggcagcatgttttttttattattttttattaaggtaaaggtatgtctatctcctctgacaactgtcagtctcggggctctatttctaaatgattgtctgaatatacctgagttctgtgaatttatacttttctaacatttggtacagcaaagtattaggaaaaaatgatttagaaatcttttcaaaatactggtgtttggaaattgaactaacccctctacatatgcacagcatatcgtaataggcttctgaatggaatgattatgccttaagtttgtctgaatcacctgggagataaagatattacttatttgtttgatcaattcagggacatagtgaattctggaagaacataaataaaaattgcagcacaattttaaactgctgcatttagtatcctcatagttcattttcgagagtcttattttctgggaagtggggctaacaagttaggtgactaatcatcctagcttgcccaggactgaggatcttcccaggatgcaggactttcattcctgaaactgagaaagtcctgggttaacgggatggttggccaccttacttttcatcctatatgataaaatgcaatacaatgttggtttttgcctaggaccctgtgggccaagaggtaagccaggcaaggatggaaaaccaggaactcctggaccagctggagaaaaaggcaacaaaggttctaaaggagagccaggtaaacccccagcttgtttcctcaccgaagaagtgctatttcgacatacagagaagtcttgttcgagtgggtgactatatgagttatctaggcctttgagtttatgttgttcagatcagaccaaaggccaaggatcaaatgttcatttggaagatgagaatcaagaattattggaacacagtatttttccgacctcttagctggtcagatgggctccaaactgatgcacagtttagcctgaggacaaatagaactaataagtcctatgggtgttctttcaaaaaggccaatacctgtttttaataacttataggagttgttagttaataattatttataggagcagtacataagtatgtagctagaaaaatattaccttggtatgagtagaagagcaactgagtatccttttttaagaaagccatcttttaaaaatgccattcttcatggtggtgggtgcctgtaatcgcagctacttgggaggctgaggcaggagaatcgcttgaacctgggaggtggaggttgcagggagccaagatcacaccaccgcactccaacctgggtgacagactctgtctcaaaaaaaaaaaaaaaagccattcttgaatagaattcaacaattcatgcgtgtcctgaaaagggaactcttaagtatagtgttttattctgaacatatgctgtatgtgtcagtttgatacctggatcaacatctaccttctgcagatgtttcaaagcactcttctggaaactacctcgatatccaaatcttctatttttaggattgctgactttgttaaagcaagaaaaaattctaaatgtgctttctgaatttactgacatatatcatgctcagatctactatattaaaatggtaaagactatagacttaaatttttaaaaattcaaatatgatgttaatataatactaattgcataactacatgtgatttaatattgtcataggtgcacagtagagtgctattaatcattcaactttccttaaagtgtggtttttgaagtgataaaccattcttattaagaattctattaatttaaaaattttaatgaccaaggctttaatgccctaagaatggggcaacagcaagagcaagggcactgcaatataaattttgtagagaactaattagcaagtagacagttcaatgctatggaggcctcacaagaatgacaaagggatctaagagtcaaactgcactggcataaactgatagccctggcccctttcttggagatacagaaatgcattggatatcacacatttgtataaaagctcacttccagttcctgccctgctcagctaatcacttcccaattcctgtgcagagatgaggagacatcttttgtttggggccaactatagctccctctgaatgagggcaggggttaggaaaagagaaaaatgtgtctccccaatatattaaaaccatggcaacttggatttttcaagtaagacatcagaccggagaatttggatgtggcctatttttaatttcaaaaaaccactcaaggtccctggaggagacaagagtgggcagaattcagagaaaattgaaaaaatgcataatattggggcttttacaaatttctgaggaaagtcctgacttccgagtcaggactaaactgtgaccctgcctgactcccaggggcacggatgtcccaggggcaacaaaactaattcctgtgatgatgtaggcccaaagtctaaccatcgctgttttctctgtgattccttaggaccctagagaaccatggcccaagtctggttggggagggagtcagcgtacagtggcagcagaaatggatgggagtgaggaagtggtagccaatgccaataccataaataatagccgttcaatgaaagaaaggagaaggaagttaaagaggaatggaagagaggatagctcactggttctcatctagaacacgacaagtgtggattagccttgtccaaatccatactccaaagtatagaaagtttttctccacagagagaaaaatgtacagaaacgatttactttgtttttaactcatataaataaactaacccttattacagtgaaaaaaaaagccttctcttcttacttgacttacaaattgatcaaaacttccttgaagtttgaacctttaaaaagagctttcaatgttttctgcaattgtttattgtagacaatgttgcaataatttgtgaatttatcaaaaccataagtaatttttgttatctactcgaatagactaagttgtagatatttgatttttcccccatcacattgtaggaggattcattcatttattcataaaaaacatacataagacctaccagatgcaggcaggccactgtgccaggcctcacagaggaattcaaagataaagacctgatctcaaaaaacgcatcaaatatacacaaacattgataagaagaggcactgtgtgataaactgcttaacatttaataatactgtttggccatttttataagccactcttctctaggattgctttcaatttatgggctcaacatatataaaatatatttaaattagtactttgaaaaaacgagtttaagatttttgtgtatgttgcaacatttagaatgtgttttttgaaggaccagctggatcagatggattgccaggtttgaaaggaaaacgtggagacagtggatcacctgcaacctggacaacgagaggctttgtcttcacccgacacagtcaaaccacagcaattccttcatgtccagaggggacagtgccactctacagtgggttttcttttctttttgtacaaggaaatcaacgagcccacggacaagaccttggtaatgtcccagtcccagttgccagttgtgctgttccacatgcagattgtaaatctttatagcctaggatgcttccctctgaagttaagtgtaaataaccttgagtgtctcctgatacattttaaagagagcaaataaaacactggcctgtctaattttcattctggaatgtaaaatggtggaaggagcctagctcaggaatgctagcctagctcctcccattcagtgcaaacaatttgcccctaaaactccctaaaccacctgtctgcatttatctttttggtgctttttctttttcttttttctttttcacacagggtctcactttcatcacccaggctggagtgcagtggtgcaatcatggctcactgcagcctccacatcctaggctcaagccatcctcccacctcagactcccaaatggctgggactacaggcacacaccactataccaagctaatttttttgattttcagtagagatgaggtctggctatgctgtcaaggtttctctcaaactcttgaactcaagcaatcctccctcctcagcctcccaaagtgctgggattacaggcgtgagccaccatgcccagcccacccatttgcttttcaatctcacaaataactgcttttctaaacctttatttggttattagctattatgtacatatgaataagtgggaatactttgaagcaaaaacactatcccaactgatctatgctagcccccatgttctaaatcgattagaaagagccaccggaagtattaaaggtgggagaaagaagatttgtttgcctattggatctttgatttctatcagtatgaaaacttttcaatactacattttgcagataactcttttgtgttgtctttgtccagcttttgctgcaggttacatttaaattagcttctctctagtaacgatgctgaaaataactttaacttactgaaagtgatactcagtctgatgtttcattaggaactcttggcagctgcctgcagcgatttaccacaatgccattcttattctgcaatgtcaatgatgtatgtaattttgcatctcgaaatgattattcatactggctgtcaacaccagctctgatgccaatgaacatggctcccattactggcagagcccttgagccttatataagcaggtaaaaatccaatcccctagttttacaatgggaccaagtgaatcacttcccttgtaatggaatgaaaggcagcacatgacagtgcagaaagtggcaatgccgccatagtctttgtttcatgttacagatgcactgtttgtgaaggtcctgcgatcgccatagccgttcacagccaaaccactgacattcctccatgtcctcacggctggatttctctctggaaaggattttcattcatcatggtgaggagaaaaggaacaggaggtttagggtaaagactacctgtagaatgttacattgtgctgggtaaaatgtgattcccagggtcgatgctgcctgctgtccgtgtgtgcaacatgccatagacatttccttgaaaatctacaaacagactttttttttttacttttggtaaataatggagtactaaaaaagacttctcaggaggagattacctacaaattctattatgaaatttaggtgaatagtagctgcgttttattgataatggaatgtctctttttattattttttttatcttttgagacagattctcgctctgtcacccaggctggagtgcagtggagtgattttggctcactgcaacctccgcctcccaggttcaagtgattctcctgcctcggcctgctgagtagctgagattgcaggtctgtgctaccatgcccagctaatttttgtatttttggttttttgtttgttttgtttttttagtagagactgggtttcaccatattgcccaggctggtctcaaactcctgacctccagtgatctgcccaactcagcctcccaaagtgctgggattacaggcatgagtcactgcacccagcctggaatgcctattttttataagataactgctttacatacattctctgtaatttttatgaaaacgctcataggtaatttctatcatttacagttttacaaataagaatgaagtactttccccagggtcttacaactatttagtggaaaagctaggatctgaacccaggtctatctgctccaaaatctgtgccccttttgacattcatatggagataaaagcaaagaaaaatagtcttttaaagaaaaagctttcagatgtaaatgctagtgaagaagtttatggattggccatgtgtgactgtgatgactgtcatagctgcacgcaggtggttctttcttttttctttttctttgtctcttgagacagaatctccctctgtcgcccaggctggagtgcagtggtgcaatcttggctcactgcaatctccacctcctggctcactacaatctctgccttctggctcactgcaatctctgcctccagggttcaagcaattctcttgcctcagcctcctgagtagcttggactacaggcacatgccaccatgccggctactttttgtatttttagtacagacatgatttcactatgttggccaggctggcctcaaactcctgacctcaagtgatctgcccacctaggcctcccaaagagcgagctgggattacaggtgtgagtcactgcgcctggccacataggtggttatttctaatctgtagcatcgctcatgatcattcctcccctttctttactcacagttgcccattcattcaaaaaaaaaagtagagaattgaaaatttgaaccccaatggacagagtgtttattcagatttttaaaattgtggtagttcacaagtgcaggttctgagggcaccgggcaagcactggcctcccctggctcctgcctggaagaattccgagccagcccatttctagaatgtcatggaagaggaacgtgcaactactattcaaattcctacagtttctggctggcttcattaaacccagaaagaatgttcaggtaactattcaccatcaagcttaatctgatgactcaattgcagaactattcaaaggttgcctgtgttcttgggtcaacgagtagccatgattttgtactactgtgccaataaagacaaaatatgggttttgtcatcactaaacacatttaatatttgtatatgaatttatagtaaattacttgatacaatcacaaaacgatctctcatctgaatttactgtattgaaagacttgtgaataatgtggataatttaaagggtgggagtagtttttattaccaaaaagatgatctataagttttcatcaaggcctatgtttctttaatgctgctgaaatatgactaaaattataaaatgccaccatatataccttttcagaaatatacttcttccataaagagaaatagtccattaatataataaatttctctccttttttttttttttcttgagatggagtctcgctctgttgcccaggctggagtgcagtggcgcgacctgggctcactagaacctccacttcccaggtttaagtgattctcctgcctcagcctcccgagtagctgggattacaggcgtatgccacgacacccatctcatttttgtatttttagtagagattgggtttcaccatgttggccgctggtctgaaactcctgacctcaatttatcctcccacctcagcctcccaaattgctgggattacaggcgtgagccaccacgcccgaccctgtaataaatttcaaaatagcaaaaatattcattaataaaacaaactcagcaaaaattcccttttatgcataaataaatgaatttttttggtttgtttttatttcagaaagcctattccatcaactgtgaaagctggggaattagaaaaaataataagtcgctgtcaggtgtgcatgaagaaaagacactgaagctaaaaaagacagcagaactgctatttttcatcctaaagaacaaagtaatgacagaacatgctgttatttaggtatttttctttaaccaaacaatattgctccatgatgacttagtacaaagtttcaatttgtttccccacaaaacaaagcaattctttcaagtcagttctgtgatctgggtctctaatctgtgctgtttcaaagttctctgtggcaaagcagcaactattcacaaaatatcaccaaaaacctattccacttacatccaaggcactgtcactacggtgattgtatgaagtttgaatgctgcaagttatgaaatatttggcccgctggattcccacatttgtcttctttctgtctttaagactcagggaggctaaatcagtgtttgattgccccgccaacccttcctgaaacttcagaccctgggtaggggaagagaagggggcatgtggtatcctggagcattgtgtatagaactggattttcagacctgctgaggaccgtaaggcctgatggaacacagaactgaactgaggttcatggattttccaggactgtttcaaacatgcccattactaacggcaaaagggggattccctgatggaaccataatacccttggaaatactgtatggttttgttttgttttgttggtttttaaagatttttgtttgtttattgaattcatttcactgtagctctaaaatctgcttgtattccaagcatataaaattttcccccttagtgaattagttttaaaatgatattgttatatacatactatgaaatatgtataactttaacttctgttttaccagcatacccacacaaataacaagaatactacttatgaaatgtgcactttatcctcattccataaatgtcggtgcataccttatgtaagggagcagttcaataatccatgaaagaacttaaggcatttgttggtttatcagactcggaatctattttctcattgctctgaatatgtcatcactctaggttttacagatttattcctttgttacttctctaattcttcctttgtaaaaaaaaaaaaaagcaacactttttatgttatatgttgttcttacaaaccatactgaaagagtccattgtttaaaaatcttaatgtatcaaactgtataacttggccgctgtatgtcttaaaacctgcttttcaatgtgttgatacattcccaaggttacttaattcaacttaactatcatcttattcagcaccaagcatgtcccaggcactgtactaacctacagagatgctaagagaaaaaaaagacttgtttctgatctaatatcccagaaaaagtaactcattgctctgttaataatctcacatatacaagtagcttccctcccctctagttttttcttccttttcactgctgttatatttcatcatgataattcagcaggcccaagtaaaggttaaaaataaggtctatgcctagggaaactcagggcttctagtttctcttagaaaagctaagagaagataaggtctgaataatagcagaaaaaccaacatctacaaaacattaaactagtgttatacttgatgataacactatttgatgagtcttagagtccagacacaaagagacaaagctttgaagatgctttttgatctacctaggtggagttggtggtgctgatatttaaattcaggctactgcttcaatctcaattgctttgtaagtgaaaaacatgacccagaggacagcacagactatggccatggctcacatggtttacatccttcactgctcacgtgtttgctgtcaagccatttttacatctaaactaagatgtgcagcatttcacttatttagattcacttaacaaacaaatttttctgctttaaaaatgtcttattgtcccaagtgtactatagcggcatatagagctagctaatctctacaaaccctctgtaggccagtagttctcaaagtgtggtctctggaagagcagtatcagcatcatctgggaacttgtcacagatgcagattctagggaccactccagacctacacaatcagaaactcttgggggagggcccgaaatatctatgttttaccaagcccaccacatgattctgatgtactctaaatactgagaaaacctgttctagacaaatacccaagcaacaactccgcaggcagttaccaagtacggctggctacaactgctccatccgtgcctctttttaaagttcaaactcacaggtgactctaaggttatctacttttactcataagtaaaagccctagactggtgctaatgtcaaaccactggcctccactcaggcctccatcttctcatgccctcttaccagtatttaacttctgaggaagacaagtgatgctaaaacctgaaattccaatgaagccatatgaacagctgttcagttgcacttctaagactttacttagcagtaaattatagctcatgtgcattattttccagataacttagcttatgagtagcttatacaattatgaagatttaatattacagataaaatgtaaactgtttctttaaaattggggcttcaactttggaatttcacagcgtgctaaaataacagatttctcagaagtctttcagcaagataaacattattaagtaacttatttatgaaagtattaaaatgcttacatttgaacttgatggctaacttacaaagattctctatgtatcaaatgtaacttactgcgactaaacttaatttaatatttactctataaccaaatgaaatatatttaaaatatattgaatattttatattgttatatcctgacaagattataatattttaatgtactaatatttctgtaattatatctaaaatattattttattatattgcctaagaataaacatttgttaaattggagctggtccttttttttcaaaatggaaataaattttttttggattgtaagaataacagatgttcactgtaaaaagaatagacaatacagaagttatgaagaagaatataaaaatggccatgatctaatcctcactcccatccaagataagtgataaatctatttttaaacaaaaatgagataaaagtatgctattttgtcaccaggatttttttttttttttgagacagagtctcactttgtcgcccaggctggagtgcagtggcatgatcttggctcactgcaacctctgcttcccgggttcacgccattctcctgcctcagcctcccaagtagctgggactacaggcgcccaccaccatgcctcgctaactttttgtattttcagtagagacggggtttcactgtgttagccaggatggtctcaatctcctgaccttgtgatccacccgcctcggcctcccaaagtgctgggattacaggcgtgagccaccacacccggccttttttgtcaccaggtttttaaaaacttaatacatagtgggcacattttcacaccaacagacaagaattaatcatcatttgcaccacagttcattgcatgggtttataacctaagataataaatccccaattgacagacatttaatttagttatattatagacatattgtacctatgtcaccacaagtttgtccaattatttcttcaagataaatctctagaaggaacactatagagtcaaaggtctcacataatctttttatatacaaaaatgctctccagaaaggttgctagaattttcagctgcgtcaaccatgtaatgaaaacactcatttccctattaatttaccaatacagactattgctgttattttacatctttgcctatctcattgcagtgaggcagaatatttgtcacttttaattagtgttttttttttaatcaaagaagtattttgatgactgcctgttttcctgtgaagggcctaatcatatctttgcttatttttctattgaggtattaaaggagtctttacaaatcagtaaaaaaagcatatagattacagaaattatgggtcatatattttgatacatgtttcccatttataatacaaatactccttattcaaggaaaacaattcataaaatttcagatgtggagagttggtaaagaaaaaggtttttaagatgcaaaatataggctgggcatggtggcttgtggctgtaatcccagcactttgggaggcctaggtgaatgggtcacttgaggtcatgagttcaagaccagcctggccaatatggtgaaaccccatctctactaaaaatacaaaaattagctgggcatggtggcagacactgtaatcccagctacttgggaggctgaggcagaggaatcgcttgaacccgggaggcaaaggctgcagtgagccaaggtcgcgccactgcactccagcctgggcaacagagactctgtcttaaaatacatatacatgcaaaatatgaaatatcatagagaaggaactttcaggctgcattaaatggcaataatgatataatcaagggaagaaatggaatgaatagtgatccgaggtaataattctaagaagaccaagaaaattgttgctcgcataaatacttcagaaacactgtcacctattgtcataggtgggccaaaaaaaatctaatttgaaaagactttgagtaaaaaagtactaatccctttcaatgaacttacttttacttcgagtaagtcaaagaatgaatgctgtgtttgagcacattctctatttataagctcgtttggaaagaaaaattttgattaagccctaatggattcttagtaatctattggcaggagactgacaaaaaagtgattgcctccttcagtttgtgccattggcatctaactcatctcaccctaatcccagctctacctattagaaattaacagataagcaaacacagaggaaaatgtaattggtttttaacaaccaggct

SEQ ID NO: 747 - DNA, 168849 bp, Homo sapiens
gaaacaacaggtgctggagaggatgtggagaaataggaacacttttacactgttggtgggactgtaaactagttcaaccattgtggaagtcagtgtggcgattcctcagggatctagaactagaaataccatttgacccagccatcccattactgggtatatacccaaaggattatgaatcatgctgctataaagacacatgcacacgtatgtttattgcggcactattcacaatagcaaagacttggaaccaacccaaatatccaacaacgatagactggattaagaaaatgtggcacatatacaccatggaatactatgcagccataaaaaatgacgagttcatgtcctttgtagggacatggatgaaactggaaatcatcattctcagtaaactatcgcaagaacaaaaaaccaaacaccgcatattctcactcataggtgggaactgaacaatgagaacacatggacacaggaaggggaacatcacactctggggactgttgtggggtggggggaggcgggagggatagctttaggagatatacctaatgctaaatgacgagttaatgggtgcagcacaccagcatggcacatgtatacatatgtaactaacctgcacattgtgcacatgtaccctaaaacttaaagtataataataataaaataaaaaaaagaaaaaaaagaaggaaagaatatactatttgattgaaaatgttgggacgatttgtcatctacatggaaaaagataaaagtagatctcataattcagaaaataattacaggattaagagatctaactgtaaaagagctaaactatgaaactttttttaaatgtaggagaacattcctataatcccaggaaaggaaaaaaaaattttgacaaggtacaaaagacaaaatgtcaaaacaaaatcagtttgagattatagtgaaaacagtattatacattaaggcaccaataactcaaagataaaccaaagattggaataaaatatttgctatacactttaatgacaaaagttttgtatccaaatatataaataacttctaattaattagcaacaaaaaggcaaagttcacaatagataaacagacagaaagttgcactatgcagttcacactgaaggaaatataaagggccaattaaaaaagaaaaaagtttacaaactcactggtcaaaacaagatctcatttcacaccattaacatctaagcacaccaagctttgccaaagacatagggaaacaggcactctggtacattgttggtacaacccttttgcagatgaacttgtcaattcctaatatatttaaatttgttttctctacgaaccacttaggaattcaaattctagttgtcacagtggtgcatataccaaaatatgcattgcaactttataaaatgaaaatataaagacaagcttactttgtttagggagatggaaaaatgaatcatactttatataactagatactatgcagcagctattactacaaatacatcatatctatatgtaccaacatggataaaatccaaaaacataatatggagtgataaaaagcaagctccaatagatacgtgtaatgtgaaactatttatcacatatgaaagaccacaaaacaataatacttattttttacggagaacagacacacacacacaaaactgtgcagggaaattacatacataaactttttgggatggaagagggagtaaagaatgtgtgtatgactttctgtattcagattttttttttcctaaaggtagaaatctgagaacaaacaagtcaaagtatattaatacttgcttaatctcagggatagataagttggtgtctgttccattactttttgttttctaatttaactgaaagtgcttaaatttgaaaatgaagcccggtgagaaggcatcctccccaaatgtaggtgtttttcacgttttgacatttgcttctcatattgctgccctgtctggaatgctaaggcaagaagaaggataaaccatgatatcttaatgtgtgaacatcaccttatccagaaatcaaagaaggggctttctatacctccactcccaggtctattgcctgagacaacaacaaggtgccgccctatttcaagtgggtgagctgggccctgacagctataaaacctggggatgcgctgggcagccagcctggaactggatgcctgtgcaaagtagcagaggtatttaattctcggcacatcagtccaaattgtgtgggtggacagttccaccccgtctaaacaaacttagcatgtagagtcaacaccgctgctatttccctgttttgagaaatgctaaagtaaaactgaataaattggagcgaaacacatccttaactggagtagaacaaaaataataaaatataatggctccaaagttacatttagctctcacttatacattgtttggcccacactatgtttttgtaaagttttggcttagttgctaatatttagaatttgagaagtttctaataaaaactggattcccaacttctctcttgaagtgatgctggcacaattgggcttgaattctagcatgctaacaactaggttctgaagagtctctcttaccccattgccttactccttacttcacctgctggccccactggggtttcaactctcattttacacatgagaaaactgaggctcagagtggtcaacagccttgcccaacagcagagtttctctgtgaagggagccatgttggtgcacattgcccgattatcagtgaacgttgtgattcctttttctacaagatgaaggcacatttcattattttactggcatattttctctctaacccagcaggtacactggaaatgataatcctgaaaacttgttaatgaaagacttacttcaagtgatgagaaaaacaatacaaatggattaatttcagcaagaagtcaccaagatttggccaaactcaaaacagaaaagtttacatgtaaaaataacaaaggaatgtaacaacagaattgaaaatggtataactagagtttgcatggtccccaagcattactttttcaggctgatcctcacataagtacaattcttccaccccttcccaatctcattcctgttcttctaaattcagaaacatgtgcaaaccctgctctggatctcttctccaggcttccccacaacacacatttcctttaggattttgcttttttggatttatttgtcctggttaaagctggtagataatccccactgagttttatctatcatgcctagtagcatttaaatacctggtctgggaattcctaatgtatgcaaagtgcatttttgttagaaccagctacacaaacagattacatagattacaaatgtcctttagaatgtgaaacagtgaataatctaaatgtaaactgatagggaaatggttcaattaactttggcatattgtgaaatactgtgcaacaaagcaaaaagaaaaacaggaggatcttaaatactgacatggactggtctacaggttgcaaaggaatacagcacagtatcatttatgttaaaaggccaacaaaaacatacatatatgtttgtgggttcatatgtgtgtgtgtaaattcatggacaatgtttggaaaactacatgaaatatgaaagtggtgaaagtggacacctcttggaagacaaggaaatggggagaggtatggggggtgtcagagagggctttagtttcacctataatgtctgcaatgtcttcatttaatttaaataggaaaaacatatagaacctatatgtgaccataggttctaaaattcttttcatgtaacatatataaatatttatgtgaccgttaatttccaatcataatctcaatgataacatttgtaaaaacatctgctcatccttggaaatgaaatttcctatgccacgttatcacccaaatcaactttttaaagtgtaaaaataacaagtatctgaaaagttaaagtttactttcacaaggtaaaatcaagtgagtcaactctaggaggcacaatcgttttgaggacaatcaatttctatttaatggcaaagaataagaaatatgggatggatttaaataaatccagtttcactcaaattccaagtcaaaaatcaaatcaaagtgtcagattgcttaaatgattctaacctgagttcgatttctaaggtgctcttaatttttcagtgatagcatttgcttttcccaacaatagcaaaggaaaactggagggcaagttttgcaaggaagaaactgagccccagagaggtcagggtttagtgtgacgtcccagctaggaagtggcggctgggactccctgcaggtgtctcctgccagccctctgtgcgctgggccaagctgcttgatttgattcaccagcgtgacaccgtgcatctccacatccggtgttctcacgtatcatccctggcgattatctatgtgtctattttttaatttactgacctctggaggcctgtccccgccatccctgactcctaggcactggacaagccccctcctcgcctcttcccccagccccgcgcattccacctgttccggggcatccccgcttgctcccttccgctcgctgcctgtcccgggacctgcgtgaagccctcagcctcgccactagcccggcagccgctccactaccgcgccgctgcgggtggggccagcgcgtcccccggacgcgtggaggagggatggaagtgcgggggtgggggtcgcgcagcccccactcaccttgctggctgcgggcgccgccgccaggagcaccagcaggagcggcagcaggagcacctgcggcctgggggcggtccgggcgctcatggtgggcgcgcgctcagagcctgggcgagtccggggaccctcaggctctcaggccaccgcgtctcctgcgcagcgcggctctgggagcccggctggaaagctcgcctcgccactcggccggggcgggttttgtagggctcggtcgcgcggttcgtccctccccacccaggctttttggttgtggcttcaagggagggaagacgtggctcaggtcccgccctcataccccctccctcccaacttaccaggcagtgtcccttctacccgggcatcgtgcccaggaggcgagaaagggctgggcgcctgaggggcaggtgggcgcggatccagggtaaggggttaaggaggtgatgctcccaaggtccgggggcccaggcggggaagtggggtgcggtcggaggtggggcgtttgggggtgtgcggtggggaggtggctgcgcggtggggaggtggctgcgcagggtggagggagtggccagcggccctgcccagattaagcgggaggcgcgccgggcgtctgcactcgggaggccccgcttgttccccgcgcccgcggcggtccgcgttccccgcctccagcccgcctccaacttgcggccgccgggcttggctgcgagagcgccgcgaagaggcagcggggcgcgggtggattggggctggaggtgcgcgtcccgtggggtggcaaggcggcagctcctggcgctgcgggcgtccccacaggtaaggcgcccataggtggggcaaccgctgtcccggggccccggcacctgcctgggaggggcagtggagggagcgtggcattcaaggggtggtggcgggcccagctggggagttgtggcccgggggtcaccagaggagagcgcgtctggctcctgggcttgtctgcctgggctttaactgggtgctgtgtgttttgattaatttggaggctcgagttaccggcctggcagtcggggcactccaaaatgccaagagaaagaggcagctgaggagaaagagaaagcccatcttattctccgctgagttgaactgcttttcaggccaaatcttatctgcggaaatgcagggcaaaacaagactcagctctggtcagggtgcgctcttcctgggggtggcctgcgatgcaaatgtgccagggcacggtcctccagccggctctcgccgtttcctgtgctacggaccacactggctctggtaaagcaattagactgtttctcagaagaatgttgtgaaatgcataaaatacaattaaatcagaatcagttttattggaatgcaattatggaagtcctcaagtcgtgatatagtaactaacacaggtgcatcatcattattgcattaaatagcttgatttaacagcaggccgattaagcaacagtaatgtcaaagtagtgatgtctgcaaatggtattttgagataatagcccaaactgaaatgtgacatgaaaataccggtgggtgcaaattatcaagaactgccaatactactgtgctctgttgcctgtgctcataagggaaggacatgttgaacttctgtgacatgttactaaaagtaaagatgcaacttattttcctatgtgagtttcctatacagatcacctgaattccatcctcaggttaagaatctttgctttggaacagtgttgctgatatttgctgcaattggcttcagacaccaagtatgatcatgcagttggtcactgattttagggaaccacttgcttgcagttaaatttgggatctattggtatcttagaactttgtagccatgcaggtaggcaaaaccctaacagtgaatgaagacactcctcccattctttttattttgactatagcatgaatcttacagtcttctttctgtcttttatgccagtgattctcaactatcgttgtgcattagaatctttgggaggataaaacaatgttgctacccagaccattccaagccaattttatcagactctctagctgttttaaaatttcctgtacattcccatgcacaatcaagtatgagagctcctgttttcacgaacatgtgaaaatttcacgcacatgttgaattaggatatattcttagtagaataataaaaagcacatatattaaactcttcattacaacttgggaacactgcggaatttatgaccatatcgcagatgttgctgtgtggtatgcagtagcttctttccattggtagggaaggttcttctggaaacttctgccactcttgtggaatgaaacggtaggtgttctgttgatgaggtgacagtgtccaagagttctgagagtcacatgattatgtttcacaaactgacagtatttaattttaaaaagtacaaacaaaaaaatctcaatgctaatgttaaatgcttctctttgccaaattccagaagattcctcaatttgaattttaattgccttttcctgaaaccaagtcattttgttggaggactagacttggttttatcaattttggaacaggaagtaatagtcaactgcaagtcatttctgttgcagatacagagctggaaagaaacttgtgatgtaaatacagcaagaaagaggcaatgctggagagcttgacctctggagtagactctggagttttgaatcctttccatacttactagtgtgacctaacctctctgggctggagtcttccttctataaaatagacatactcaccatacccacctcagggagttgttggaatctaatgagatagcaaaaaccctttgtgcagaatcttcacacagtagtcacatagtgaaatttgattctttttttttttttgtacaaaggaaaataggtggccctgatgagaaatggtggcacgtggtagagatgctcttctgagctcagtactaaaatggctggaggcaagcatagcctatgaactcccttgaggttaatacacttccaaggcctctagaaccttgccttggcatcccttgggaccagcagcattggcctccctgggagcttgctggaaatgtagagtctctggtctcactctggatccactgaatcagatcccacattcaccaagatctccaggtgattcgtatgcacctggtacttaaaactctgagaagttgcttatctaaaagccacatttaaccacctattccccacctgccacatttagaacaatgtttgacaggctcacctgtcaaacaaacaggtggtgttaattaactggaaggcttgattgttaaaaaaattgtctttgggtcaagagagttgatttttcacagttggttctttaaatgtaaaacagcaagaggaaaggaggatggttcttttcgtacattcaaaggacacagaggtctctatttttttactttgatgccatgtaggagttttaaacaaaatgagtggttattgtctttgacaagtcctatgtaatttgttttcacagtatcatgtccgttttctacacactgtttaaatagttgtgtctgcttcactacatttcaatgtaagccccattagggcaggggccatttttgtgttctttactgatgttgaatgaatgagtgaggctgttactgtttcctgaatgaattaatgaaagcacaaatgaagttgaatgacttgtcaaattcacccagcattcacacttagtctggtttcttcctaagttcatgatctacctctagccttcattgtagagggacgagcctctacttttaatgagatacaagatacacctcttatgctgcccacagctgcttcattaatcttgtttcatttcatctcccctcttagccatccttttccttttaagaactttctcttttccatacctctgaaacaattaggctcttgggtgcttttagaatctgagtgattaccaactcatatcatttcttgccattgcatctctggactcctcttctgcttctctaagttcgtggctcctgccttgcactatcatctgtggattatggtagctatctagctagttttctgtcctgcaggctttctactctgaaactcatcttctatgtaattatcagagttaccaattaaaattgcaaattatgctagcaaggacaggtgactttagaggcagttacaaacaatccccccagtccagaggcttatcattatggaagttttcttatcatttctactacatattcatcacgggacatggggaggtgggaatggggtgggggtcctctgtttattgtagccactcagggacctcctggaaattccctctcaacatcttctctaatcacctcagaaggggaagagaatgtgctaaagtaaaactacccttcaaccttcctcctagatgtgacacaggctacttctactcacatttcactggctaagtggatcacgtgatcatgctttattctgtaaggggcagggaaatgaaatctaccacatgcctggaaagagtgggaaacaggtggcaaatgtcagtaatactcatcacacacatcgtgccacttgtttgtttaaaagcttccagaagttcccctttaacttcacaactgatttcacatttcttggaatagaatagtgtggtctcaagtcaacatttttgttttatctcttgtgtcatcccaagctttttatgatttctctggttcactatacagacttcctcacctcacaccttcgtatttactattgcctctgcccacagggacctccttcttggtctgtcttctacaactacctgtgctttaagatctaggtcaaggattaaagagcatggtccctgtgaacacctttgtccagaactttattatatagcacagaaataatatgtggtgatttgttgttctatattacaaagcctttgagggaatgttcagagattatttgttaagtgtattagtctgttctcatactgccatgaagaatcacctgagactgggtaatttataaagaaaagaggcttaattgactcacaattctgcatggctggggaggcctcaggaaacttacaatcatggtggaaggcacctcttcacagggcagcaggagagagaatgagtgctgagcgaagggggaagccccttgtaaaaccatcagatctcatgagaactcactcagtatcatgagaatagcatgtgggaaaccacccccatgattcaattacctcccactgggtccctcccatgacatatggggattatgtgattacaattcaagatgagatttaggtggggacacaaagtcaaaccatatcattagggaatctaaaaagtatatttcttgaggtataatctatgttccataaattgcatccacttaaagcatggaattaaaaaagttttgccgatgcatccaccctatgaaaccaccactgcccatcaagctgcagtatttttctatcactcccagaagtttctttctgcctctttgctatccatccctctttccaaaccccatcctcagaccactactgatctgctttctgtcactgtagacttcattttagttggcattttctagaattttgtgttgacggaattataccgtgtatactatcttacatctggcttctctgactctgcatagcaatattcagattcatccatgttgtgtagattaggagtttgttattttctattgctgagtagtagtccattgtgtggagatcacactttgaaaaaaagtccatttacctatttttgggaatttggattgtttccagtttggggctactacaaatcaagctactatgaatatttttctacaagtctttttgtgggcatgcattttcatttctcttaagtaaatacctaggaatgaaatggttaggtcatatggtagatgtacatttaattataaaagaaatagttttccaaagtggttttattctaccttctcaatgcaaggtagaataccatgcataggagttccagttgctccatatatttattttgctgttaattttttaattttagccatcctaatgtttatacagaagtatcccagagtggtttgcatttctccaataactaacgatgttgaatatcttttaatgtacttattgaacattcatgtagcttcttttgtgaagtgcctattcaaatcttttttccgcttaaaatttggctttttatcttcttattgttgaatagtaagagttatttatatattgtggatacaagatcaatgttagatacaagtattgtgagtattttctcccattctgagaattgtcttttcattttcttattatttttaagaagcaaaagtttttattttgatggaatataatttataatttttttcttttgtgatttgtgcttttcttgttacctgagaactctatacctatgccaaaattgcagaaattttctcctatgttttcttcttgtgtagtattgttacttttacctcaatgatctcttttaagttaatttctgggtatggtatgagataaggattcattaaattttttttccatgtgaatatccacttgttgtggcaccagttgttgaaaagactttttcccccactaaattgccatgattgccatggcacctttgtgaaaaatcaattgatcatcatgtttgagtcttttggttccatttatctacatgtctattcatttaccatcattcttatgactagttttttagcaagactagtgtaagtccttcaactttgttgctttttataaaaattgcttaggctattctaggtcatttgcatttacatatatatggattttatttgttaatattatgttaaggagagtcatgtttatattcacaagatatattgttctgtagttttcctgtaatatctttgtcagttttggtatctgaataatgctagcctcataaaataagttggccagcactctctttttttctatattcagaaagaggatataaaaaaactggtattattttttcattaaatgtttgatagaattcactagtaaagccacctagccctgaagttttctttggggaaggtttttacttacaaaattcattaattataaatttaattgctatagggccatttaaattttctattgtttcttatgtcagttttgataattgatgtctttcacaaaattatttatttcctctacattgttaaatttattgacatataattataagaagattctctaattatctttttaatcccctttgtcatttaatactgtcatattgtcatttttaatattcccaagttttcaggtttatcagttgtatacagaaccaactactaatgttgggtttcattgatttttctctactgtttgaatgctttctccttggttaatttcctctttaatatttattattttcttcattttgcttcaggtttaatttgttcttttcctagttttctaagatagaagcttaggtaattgattcttgatttttttcttttctaataggaaattttatacctagaagatccttttctgcactgggttagttgcatcctataaattttgatatgttgtgtttttattatcattcagctcaaaacattttctgatttcttccttgactcatgggttatttggaagtgtgctgtttaatttccaaatatttgggactttcctagatggcttaccattgaattctagtgtaattatctgcaagatttcagtcttttgaaatgtgttgaaacttgttttatgatccagcatatgatctattttggtggatatgccatgtccatttgaaaagaatatatactattatggcttggtatagtgtcctagtatatattaaattaagtaaagatggttgatagtgttgttcagatcttctgtgtcttaactggtattatactttgttctatcaataaccaagagaagattattaattcccaattatattttaggatttgtctattttttccttcaattttgcagtttttccttcatctaatttgaagttctgttgttaagcacatatattaatatttatagcttcctgcaatattaatttttaaatcattatcaagggtcactgcctatcctgaagtcttttttatgtgctgttaatatatccattataggtttcctatgctgactgtttgtgtggtatatctttttccagtcttttattctcagagtgaatttatgctgactgtgattctacctagaattgtccttctgtatatctccttctaactaactgaaaaatttatcccttgtaatttttctctcctgatgtttaaaagatactttataaggtactgtcatagcttattcctattttttttttccatttcccgagatcttccttccttcctaaatcaagtcttatctgcttcctggggtctgcctggtgtgccctggttttcactttttttttttttttagacggggtttcactgtgtcacctaggttggctgcagtggcctgatctccactcacgcaacctctgcctcctaggctcaagtgattcttccacctcagcctcccacgtagctgagaatacaggcacgtgcaacccagctggctaaattttttgtttttttgtagagatgtggtttcatcatgttgcccaggctggtctcaaactcctgggctcaagtgatccatccaccctggcaccccaaagtgctgggattgcaggtgtgagccaccacacccggccgggtttttatgtttattgctttttcccaatgtattgtgagctcttttttttttcctccatggcagattagaaaggaaggaaagaaacatttattgagctgctcctacatgccaggcattgcggtaggcaccaagtcctactcatttaagtctgttaggtattaatttacacactgagaaatgaagtgttcacaggggctacaaacttgctaaggattacatggcgaagtgtaatttttagttgcataattaattaattacttatatgatgggagtcatcaagatctgaacacaaatcttcttaacttcaaagctctacttttattcagtaaccatgagcacagagatagcaatggagggaggcagatggtttccatgtaggggcagtggcagcagaggtgagaagtcatcgaaggcaaatgctagcctcacattgtatttgggagtggaccctgcctagtggaattgttgagtattaccgctggagttcacgcccaaggcaattccaggaggtctgaaaggtccagagaattcagatagagtctccagccctacttatggggaaaatcataaagcaaaacaaatgtgggggattagtggttttggcaagagacttgacaatactctgaatcaagatgtcattcttaacttggaggcaaagggctcctctgatttggaaagtcagttgtataattttggaacatgtattaccttcttgtggttccgagaagtgacattattatggttgctgtcaaattttctgttgatattgggaggagacctcaaggggaaaatgataataaaagcctatattgccagatggtgggtgaactgagatctggtccaattgcactaacaaactcaactccagtgtcaactgaggactctgcagcagtctcaaacagttcagctgaatctggagggaaggaaaggtgggggtgggcttggccatagtccagcacattctgatcaagttggaactccgagtcattctcaagaatttagttgagtaattgtccagttttccttgctgcttctcagaaaacatgaagctccatccacattccggtggtccatggaccacatagactcatgacccactttgaaaaccttgggatgtgggatgagagtgactgttttgctaaagagctcaaaccaacctaaattctttgaaagtctgaaggtagggtcaaccccaaaaggtgggattttagaaagagcaaaaccaagtaaccagcttgtatgttgggaaatggttaggttgactctgaacagaaaaaaatgtagccctccaaaggaggtgtccaggtagatggatgtgaataagacatgtcattctttttctgggaacactttcatgacctctgagatcctctgcttatttctctacaaaagctgaatattcgagaattctgttttagaaagagaaatgtatatagaaacaggtgttcaagcaatcacaaaaattattttggaaagagagtattcagatggctcagtgtcgaaaggccaaaaaggaaaatatgtgcagtcagtgagttagtagtaaattattttactgaaccaataaaaaattatcattaaacagaaatcaaagatttaatgttactttggaagaggagaaaacatttttaggcttctgttacctttctgtgactggaagcatccaatactcagtgttctgtttatctggtcccccaatcttagacatttctcctcccccattcgatgagaaccccagcagggtgtatttgttttcaagattgggttgctgagaaaataaattccctgtggtagagataatgatttggaagatctcagatcttgttcccaaacctgtcatttggaaagcattgggcagagactcataagaagtcccaggggaattggagtccaggaattttcataaaggagtgaaggggggagaaaaaagcctcacggaattagaggaggataacaaaatggtatttgctgaatgtacatgctggaaattactgccgctgggaaagaggttgtggatcttacttgggttggtgagcaaggtggacttcaaaggcccagggtgcttatgttccatttccctcttggaagagaggaggaggaggaagtgagctgcttcttgtggtggtggagctttggacccagctgtgaagggtggggccatgccttctgtccaactgggctgcagaggtcagtttgctcaagtaaattgacgtaagactttatgtcaggaatggggcagctctcaggagtaagctgatcatttatcctttcatgaaaccatctgtccttctctttttgcattttcctcttttgaaacaggttttcatgcttactcagtgtgtccattttctctatattcagttttgcccttcactttggcctgcctcagccatctaatgtccaattctacggtcagggtatctcctgatgcatttttctttcttcatctctctctttctctcctgtctcggtttcctaatttcaactctcctagaggagtgatccacattctgtctgtactatcctcatcccagagtcagttctctgtcactcagccaagttctgggttgggctgctttgggtcagtggcttatctcgagcctttccgtgtggctggggagacaaaatcaggtgatagaaaacctggtcatgcttccacatagctgagctgaaggtggggctctgacacaactgtagagaatgctcccttcttgagaataacagttagcaaaataatgccctttaaaaggcacagcacctctgcagaagtttcctgtagagggaatcttctaaaactgttgtctgcaatgttagtgctataacactttggcttgttgctgttatgatatggtttggctgtgtctccacccaaacctcattttaaattgtagctcccataattcccaagtctcctgagagggacccagtgggagataattgaatcaatgggggtgatttgccccatactgttcttgtggtggtgaataagtctcatgagatctggtgattttataagggattttccttttcgcttggctctcattctctcttgcctgccaccatgtaagatataactttgctcctcattcaccttccatcatgattgtgaggcctccctagccatgtggaactgtgagtcaattaacccctttcctttacaaattacccagtctcaggtgtgtatttattagcagtgtgagaacagactaaatacaagtaattttttttggtgatagtgatagactcgaacagaaacacactgcttcgtctattcccacatgatgacacctattcattcgtgggaaggtagatgagtggaatgctcttctgagtgatggggtatttttgtttggtgcagtcaaaagctttgttgaaacaaaatattttgtgctcttaacacaggtggttgcaacaaagaaaaccctcttagattgttgcagacaacatgtggctgcactttgcgaactgcaaagcgccaggcacactgctgtttacagtgtcaggccaacagcaagatggaggctctgctcagctgtgatctagcagttgcatcttaggcaggagaacagtcataaaagtctctgcaactcttttgtggcttgttttaaggcctgcttctggtgaaacagtgaaaagggcagtttttaacctttagcagctcattcaagacagagatcttcaaactgaagcacatggacccttgggagacaaaaagattctcaggagttatgcaagcaacttggaaaattcactaaaggattccatttccagattctcaattgtcatgtatatccttttgtagaattgctctatccaaaaatgggtgtttcttccaagttttcacttcctctttcacaattgccctgcttttcaaaagaaaggcaacccctcaaccaccaatttttcccaaatattaccaccctgctttgtcccagggtgtaagaactgtctgggggctgaatgagggccagtgcattggctggtgtcaagaacaggaacctgccagctccacaactcctgggtcagggagtttccaactttttgttttcatcataatggagggaggacttgtcagcctggaaatcattcaaattaattctagatgataaattagtatctcactcttggtatatatgttagttcattcaggctgctacaacaaaatacctaagactgggtgatttatgaacaacagaggtttattgctcacagtgctggaggctgggaagtgcaatgccaaggcaccagcagattcagtgtctggtgcaggctgctttctgctttacagatggtgccttcttgctgcatcctcacatggtggaaggaaggggcaaacaagctctttcaggtctcttctgtaagggcactcacctcattctggagggctcaatcctcatgacctaattgcgtcccagatgcctcacctcttaataccaacacattgggggttaagttgcaacctacgaattggaggtgcaggacacaaacattcagaccatggcagtttactactcaagagaagttaaaagaattgagtgatatttgtgtagcacatttttttcattcacaacttcttgtttatgttgaataaattttattagtacctacagttttggaaactaaaatggaataggattgttgctgaacctgtctcatttcagtagaaaggatcgttgatcttgagctacataagctgatacgaaataaaaaggcccaattcattcactaacaactatatttcccacaaaattttacttttgatattcaataattgtttatcaagattaaaatttatgtttttgatgaattatatactactaataattataatgaaagccaattttggaaaaaattttaagaattagagacataatcataagtattttgttgcagagaaatataataatgtgatcaatatattttcaagtatggaaatacattgcattaggatatatgtgggggaatggaatggaaatatgaatttaaaaaatagcaatgtaaaattcctgttaaagagcttgtgtgcatttattttaagctgatgctggtaaaaatcagactgctgtgacattatgatttattggatgcatctaaaataatgctgtagtagttttattttaaaggtcatcatttataatactccagaaattatattctttgtagctattaaaagagaagatgaaagttttaagatgttaaaaaaaaaaaaaggagggctgatatggtttggctctgtgtccccacccaaatctcaccttgaattgtaataatctccacatgtcaagggtgggaccaggtggagataattgaatcatggaggtggtttcccctatgccgttcttgtgacagtgagtgagttctcaggagatttgatggttatataaggggcttccccctttgctcagtactccttctgtctcctgctgccctgtgaagaggtgccttctgctatgagtgtaaatttcctgaggcctccccaaccatgcggaaatgcaaatcaattaatctcctcttttctttataaattacccagtctcaggtatttcttcttagcagcttgagaatggactaatacaaaagtgtatagttaaaaaatttttattataagataattcttataataagagaattcttagtagaagagcagagaagtccaaaggtagctaagctggagtgtcactagggagaagggacacacactggagtcaacaaactggttctgccacttactagccttgtgactttgcataattacttaaattgattcactttttttcctgcacaatgaaaatattaatttccttactaaatcatggtaagaattaagtgacttgatatcctacatgtgatcaaagtgtcagtttctctccacttttcccaaggccagttatccctcattcttccttcttccacgccctcacttatagtcaaagttagtctcctttcatatcccctattaaatatacttgatttacattcaaaagatcccaaagtatcttctatatgttcatttacccaaccaatatatattgagaacttaatacattccaggcactacgatggtactggggatacatctgtgaataaaaaaagacaaaatcgctattgtcatagagattatatggtaaccaaggacatgtgatgagaatgcattggctactcccagtgtcctttcatggttttggctagtgagagaccagttatgtttctgcaaattggcccatccatccgtctgtctgtctgtccattcatccatccatccatccaattaaaatgtactgagaaactcccaggtgttaggaccataatcaggccttccctctctggaacgtgaccacaacaacactctattttaataaaattctcctctgtacaacctttatcacaatacatgtgaattttatttgtatcatatattttgggatcaaaatgtaaatacctcttgtttttctttaatttttgactgtttcctatttattaaaaaatatcaaatgctgtttaagtattcaaaaaatttgcgttttccttccaaaacaagaatttgtttttattgagatgtgctttagacaagcttgtccaacctgccttattttgttgttgttctattttgttttgttttaggcttttagcagcctgaaaccatgatttttagtttctttctctagtgataagcagaaaagagagatgaggaaggggctttactggcccaaccagaaacagaaactagggacctatgactgaattctctcccttaggcacccctgagtttataactaaaacaaatttaaaattatggatttagggataggaaaagatctgggtgttcaaagtgattcagtttctgcttgatattgaaactttattgtagaatgttgttctaccacttacttgggaaacaagtcttccatacatacagcattgaattaatttgctcagcttttacctagaagtttaaaaataggtaatggccaggtgcagtggctcacgcctgtaatctcagcactttgggaggctgaggcaggctgatcacctgaggtcaggagttcaagaccagcctggccaacatggcttaaccccatctctactaaaaataaaaaataaataaataaataaaaaattagccgggtgtggtggcacactaactactcaggaggctgaggcagaagaatcgcttgaacccaggaggcagaggcagcagtgagccaagatcgcgccattgcactccagcctgggccataagagcaaaaccccgtctcagaaaaaaaaaaaaaaaagttggtaacattgaacattcccggtttccttctctctacctaattctcatagagacaggtcttttaaagaagccaaagttttttaaatgatacatttcaattatttgagccaaatatatcttttatcaaagtaaagacttcttcgagtcaagttttaaaatattttttctattttatattgataaaattaaattttatctcaataaaaatataattcacaagatgaaataaaattcagcattttaacttttttaaagtttactattcagaggtttttagtatattcataatgttgtgcagccataaccactgcaattacatcatcccagaaagaaactcaattctttcctctcccaaaccctgacaactattaatcaattgcctatctatctgtatggatttcctattctggactttttatatacatagaatcataaaatatgtggcttctttcacttggcacaatgttgtcgagattcattcatgctgtagcacatatcagcacttcattccttttcatggctgaataatactccattgtatggatataccatattttccttattcattcacccactgatggacatgcgggttgtgttcaccttctggctgttatgaatatgcttccatgaatattcatgtgcaagtttatgtgtgaacatgtgttttcaattattttgggcatatacccaggagtagaattgctagatcatatagtaactctatgtttaactttttgaggaactgccaaaatatttttcacagaggttgtatcattttacataaaaatacttttatatgtatttgctgtatgtgtacaaatatacaaaaatgtatgtttgtatactagaagtttccttttctagtttcataaagtaaaagaagcatttgagtgaattttaacttggatgttcaagggaaaaaattaaacagaagaaaattccacatagcaaaatgaagcaattatttatacatatataaaaatatattttatatttaaaaatatatattttaaaaatataatatatacacataatttttccatttatcaaaaatatattcatgatatagaaagggtttgaagattttttatttctgaagataaaaactgatatttattcagtttcaccatcactaaggaaagattgttgaagttaccctttagaaaatatttccataacgataaaaaatgaaagtaattattttcaacattataatgcatgctgtgttttaagtgatatatttatatctaacaggaacagactttgacccagaacacagaacctcacttgtcaacaagaaccttctggaagagaagactggcagaatattttttaagtactaagacttgcctgcgatgtggtctctgcacatagtactaatgaggtgctccttcagattgaccaagtccttggccacaggtccctggtgagtatcctcagtgtgattgcctgcttttatttagtaatttctactcaatgtttgttctatggatgtaaaccgtctgaatgcttaatatgtcaaaaagccaaatcattccagaaagctaagggtatgtctgccatttcatgactcatttttattattgaacaccaaccctctcaattttccctgaaatgcatccacaaaatcaccaaatgggaagttgcacaaggaaaggccccagattcttgctcgcttactcactaggtttgaatagcaaaagacatatgcccaaagtttcagggtccctataactagaagagttaggacagactacttcacaagtacagattaataacacccccagccctccacagatgtccacgtcttaatctctggaatctgtgaatatgttatgtcacatggcaagatggcaaggggtaattaaagctacggatagaattatggttcctaatcagctgacattgagatagaggagttgacctgagcttgactatctggatgggcccaatataatgacaagcatccttggaagtgaaggagagaagcaggagagcagtcggagaaggagctttgactacaaaaacagaggccagcgggatgcagcaagagagacgcaactggccactgctggctctgaaggttgagggggaccaggagccaaggaatgtgggcagcctctagaatctggagaaggcaaggaatcagattctccccggggacctccagaaggaatacagctctgccaacaccttggttcttggcagtcagacccatttcagacttctgacctccagaaccataagataatatatatgcattgttttaagcctctgagtgtgtggtaacgtgtgacagcagcaataggaaaacaggaaaccaatatgagattgttcaacgagactcaaaatgacattgggagttaacacagggaaatgttaaacagtgaaaaaatacaaaaagttctgaggataatgaacaagaaattacggggagtgaaagaagtgaaggtggtgggaaggaatatggtccagtcttaactgatttggggtggacgtggaagaaatggaaaggaatcttaattgtggatttttttttaaagaaaaaaaaaaaaggaatgatcttactttttaatatctacagtggcagaaagaacaagtccagtgcagtataaagggactatgaaggagcttcggacctgacccgagctggccccctcggggccattctgtctgcactctttggagcatattgtccaacttttctaagtctgtttgctcttctataaaaggtttaagaaacatgctgtgcctacaatccttgatgagattatatagagaaaagcgacaattgctataaaatgcaacatatcctatttaaaaatgtccagtgataataactcatttaacaagcaagagttgtaaatacacattcaacctgatttaaagcagttgattcccggtgtttaacacctcctttatatttttctctttatttatttggttactacaatgaaaagccaacctggcttgtgttggaattatcatgaaaacagctgaggagagaggaaatttagtgtgggagccattaagtatgggctggacccagttactcgtctcccagatccacagccctgtaaacatctgtagtgtctgtcggcatctcagcaaaagaggaagaagtagagggtggagaacaaaggctcacttaggacatgaggttttagagaggagaaggctctacagagaacaaaagaacaaggatggcagataaatcacagcccagaactgagccccagttctcctaccatcctttggaatggtgtgacccgaagttctaaccacagctgttttaagcgttaaataagatgatggatccagaagctgtttgacaaatataaggtctagaaaatatatgcagatgtttaatgggtgttttgttttgttgttttgagacagaacctcactctgttacccaggctggagcgcagtggcacgatctcggctcactgcaatctctgccttccgggttcaagtgattctcttatctcagcctccggagtagctggggttacaggcatgcaccaccatgcccagctaatttttgtattttagtagagatggggtttcgtcatgctggccaggctggtcttaaactcctgacttcaggtgatccgcccacctcggcctcctaaagttctgggattacaagcctgagccaccgcacttggccttttagtggtcttttaaaattgcatatgtcctctgttaaaatttgtttgtaataatgaagttaccccagttggatttctgcctcacttataaggccctggactacataacttttccctaaatattccatattatttccttttttctccaaaccatcctcccagtccagttaggtttccttccaccttccctccttctagttgcttccactaaatggcattatgggatacactggtctcagcaatgtgcatgtctgaacaaagctgcctccttccttctctcctgcagttttcattctgagaatcatcttctttcactcatctgtccctccaggtctcactttcagagggtcctcacggtccccagcacaatgaggaccacacaaggggttcaacacacacttcttggctgattaaaaagaggaaaggcaatgatggcagccagagagaggaaagcatggatcttgtcactgatgacaagtcggctagtaggagcagcctcatagaaataaaaagtagctttctggaattaattcctttactctttttctttttgtttcacatgaaaagaaactgtttaaattaatctgcgtttttgtttttctgtaggtcacttatactcattctcttttctgtacaatatgtatatggggtaagtacattcactagctctggttgcgttgtgaaaattcactttatagaatgcataatttttgttatactttcaaagaaatcaccctctgggactcaattttcttacctgtaaaatggagaataggactaaataaactctaagatttcttttatattgtatagtcaagactgctttctgaattgcctaggtattggggatttctttattttaatacaaacataaccctttctttaaaagtttttttttggagacaggcaagaggcagctgggccatttcaagattaaatcaagaaatacaagaataatttgaacattttagctcagaagaaaaataagcccagaacattctgtaataagctatctttcttctgcttcctcactgaagaatcccagtcattaaactcaccctcagacgtgtctgggaaatcccattgtggcctgcctgcaactcaggttgatcttgagacaactgacttggtttaaatcactctagtgaacataaccctatctgttcatactctccaccttggattcacccaatgcaatttcagtgaatcaagttattgtaggttttttcaaagcaaatcaaagtgcaaaattaccttctgttctccttttcctacaagttgggagcagaaaacacctgggtcaaagaatgaggagccagtggttcttggctctgccaaagattcatttcttaacttatataagactcagttatctcctgtattgagtagggatgataagacttgcccgactttgttgacatgcatttgagagtatcacctgaaataatgagtggaaacaatactatgatatatacatgtgtattttttctatttctcttacctgatttttaaaagtttatttttgtgttatattctttttcctgttataaaagtctgcagagtcctagattttactttttttaaaatattgcatacaagtaaacataatttctgaatcaaagatttttctatcccaggacttctaccagcttgtggtgtgcagagagtctagagatttcacacagggagtggccatattatcattgggttttaaaggtagcaatacaaatcgatgcgatgtctgtgggaagcgatttggtattacccatccggattttgaatgcacgtacctattgacacaggaatgtgtctttttggaatttgtcatacgtgtttattctgattcatgcatacagataaatatgcccaagagtactaatttcagggtagtgttcagtatagacagaagggagctccctaaatttccttcaacaacaactggttaaacaaagtatggtatgtggtctgatggataggcatatgtattactttggaatgattttgaagactttcaattatgtgaaaacagcaaaatatagagcaatccaccatttggataaaaataaaacaagtccaaatcaccaaaagtgtgtttgtacacatctgtgcctgtgtgcccatgtgctcatctgcctctgtgtgtgcgtgtgtgtgtgtgtgtgtgaatgaggtcattgtatgaatatgcttattaatgcccaaacacctatttgaaaaaaattatcctgtataggagggaacttggggccagtgttgaaagaggacatttgttttcctgttacactctttggcaccatttgaatttttaaaattatgtgtctatattatttgtttttcaaaaaagaagatggaattacaagtataagacattaataacttctttgtttgaacttttttttttttttttgtgagacagggtctcactgtgtcacccaagctggagtgcagtggtacgatctcagctcactgccacctctgcctcccagttcaagtgattctcccacctcagcctcctgagtagctgggattccaggcatgtgccatcacatctggctaatttttttgttatttttagtagagacggggtttcaccatgttggccaggctggtcttgaactcctggcttcaagtgatctgccagccttgccctcccaaagtgctgggattacaggaatgagccaccgcagccagcctttgaacttttctatgtgacaaatatatgtttaacaatatctgagataaggcagatagtgacttttccttttttctctttgaagaagagtaacattagtttccgagagcgtgaatgtattcccagtgaatgtcgttcgtactttgaatgtttaattgtctgaaatattgtgtttatcttttaaaatgaatttatacaatctatttttgaggtgcagacctctataatttcaccctcctcttttaaatatttattggggaatgtttacgtagaataactttgcagaggctaaaatcacctcttgctttttccttttactgatccaagtcaaaccttgatatgtgactattcctgtttttttttttttttttttttgaatctactaatctattttaaagtgattctttcctgaaacatagttttgctgcaaacatctcagtgatgtttggcaaaaataagcaaagaaataataataacaaacttgcccttattatcaagccatctaatcagctgaccttattttttttcctctagttgttttgatatttcagcgaacacatagtaatgaagcccaaccttaaatgaacccaagtattcaatctagttactttaagtgctttcatgctgtcccgacctgggcccgggcatttaattttttttttaaccttatcagggtgtttaacttaatatttctgcatttatagataacaacattactcaaaactcaagaggcatatatttctgaaacttcaaatacatttttaaacttaaactatctaatcgcttgactctcgtcaagcttcaaattcttgtatgcttttaatgatccatgagaatattgtttacaaagatgtctttttaaaattaatgcttaaagatattttcttttggattgtgtctgagcatatttttctccaaaaaataagcctaaactgtgcgagtgaaaagaaaaataatatatgctgattagactcttttccctcccatacacatatacctgttcatatatatgtatacgtacatgaatattcacatatacacatatatattcaatgcattcacacatacatatgtatatatgtcttccatgggactataaatattagttttattgttttatgttttcccatcatacagtggtctaaaggcttgagtttacagccttaagtttaaaaaggttgatcaatcataaaattgtatggccaatgtataaatgttgcaatgacagctaggccagatcatgagccaggcaaaccttttctctgatgctttcttgatattcttatccatgcccttgggtcctagcacctagaggtgatttgtccactacacaggggcctaaaccaccactccctccccactggcaggcccagcctgggaatgcacgctcagtgctcatgttcattgcaggtgcatcatggtgattgctgttaagggatctgcctatggaaatagtactctgggactatgcttttatatggaagtggatgatgactctggatataggtgattaggattcatgagaacaaggagctgattcttcctaaagggtgtgtgtgtgtgtgtgtgtgtgtgtgtgtgtgtgtgtgtgtgtgtgatgctctaaagacagtgttggaaagtttgctaaaagtggggaaaaggtccaaattattcaagttcaggagtttctgtttgagaaacacattagagaaaccatcttggagtctcagcaaattgtaggaacaacaattttaattttaagcccaaggatgggacagaagaattgtcctaggaaggacagtttgatgagggaggagatacactgtagctgatcttgaagataaagcaaaacaggccctgaaaaaaaaacaagcttttcatttaaactagactccactgtctatgcatggattgcctaaccacatagtttacactctaagactgttcacaacttaataaattaagtcttaccgaaagggagaaactgcagaagattccagttaaagccaaacgactttagaaggatacttattttccttcagcatcctcagtttggaagcttcttgctcatataatcaaccctccttattattaagctactgtgtaagttcttcatctttttatatgtcatgattagtcttttcttctcatggagtcaaaggtaaaccaagagtgcttgttataatgtatgtgttatgcacgtagttaaacgatgagtactggtatactaaataagatgcttcactttccagagtggaaagaaatacattggtccttgtggaggaagagattgctctgtttgccactgtgttcctgaaaaggggtctcgggtaagtgatgtaaagaccaacatgggcagcattcctgaattttgagaacttgtgaatatttaatataaagtaatcccagattcttggcaaattttagtcctcgataatgtttatgtatttcacagccgaagtttttcacattctaatagcaatctcaactatattagacagtccaggcttagaagatagtctaggaagctgcgattcacccattgttttatatgacactagtcttgtgaattgtcctgtggaggaagggtcctggtgtgaaatggtaactactgggtcaccatcctgaaatatggcattttaaaggctctgagaggtactgaagttggtagaaaaaaatccaagtttgtttggtctttccagacagttgaccacaggactctttcttggattgtcgctattgaaacaagtggcacagtgttctaatgaagtgatagctatattttttgtatgcttgttatgtgccaggcactgttctatgagttcaaaatgcttctgctcattgacttctcgtaagaaccttcttaggataccatgtttgcagtgcaggagactgaagcccaagaaagttagtgtcttgctcaagtccacccagaacgtttgcgttgatgaccacgctagattctctgttctgcaaagccaagaacctctttggttactgtctgtcaggtctcttgaacatttgttaatgtctcccccatgttctgacagcagcccactaattcatttgtgataaagtattagatcaaacaattctctaattacaattactcccacaatctcacaagaaaggagtgtggtatagaagtttgggacaatttttgagtcagatcaatgattcttttgaaatgtgtcctcatccattctcgctgctgtaacagaataccatagactgggtggcttacgagaaatttatttctcacagtccaggagggtgggaaccccaagaacaaggtgctggcagatccagtgtcttgctgaaggcctgcttcctggtgtgcagatggtgtcttctcactgtatcctcatatggtggagagaaagagtcctctggggtcccatttatatgggcattcatccaattcatgactactccgctctgattaattacctcccaaataccccatctcctcctactatcaccttgggggttagaatttcagcatataaattttgggggccacaaacattcagtctgtaacagtgttcaagtcaattgtagggggctgtgcatgacattcaaaaagcacagtacagtaaagaggagtctacaaggacacaaaacactacccacaagagaagggacaacatatttctctcatggtattgcttcatctttacacagcaggtgtgcaatgggttcctttgttggcctattttactgggagcagctaccttattgagcataagttatgacaaatccactgatgcttaaactgctttgttccttcttcagtacatcaaaaattttgttcatcagaatttatcttgagctttttcttttttttttttttgttttgagacagagtctcgctctgtcacccaggctggagtgcggtggcgcgatctcggctcactgcacgctccgcctctcaggttcacgccattctcctgcctcagcctcctcagtagctgggactacaggcgcccgccaccatgcctggctcattttttgtatttttagtagagacgggatttcactgtgttagccaggatggtctcgatctcctgacctcatgatccgccagcctcggcctcccaaagttctgggattacaggcgtgagccactgcaccaggccagagacctttttcttttctattctttttcttttttagacagggtctcactctgtcacccagactggagtgcaatggcatgatcttggctcactgcaacctcaaactcttgggctcaagtgagcctcccacctccacctcccaagtggctgggcctacaggtacatgccactacactaggctaattatttttttgattattattattattattattatttgtagaggtggagtcttgctgtgtttctcaggctgttctcaaactcctggcttcaagtgatcctccctccttggcttcccaaagtcctgggattacaggcatgagccactgtgtgaagccggtcttgagccactttcataatataattttaaaagtgaagcttcaagaaaacaaagtccttagcttttttgtgtaaatgtgcacattatatagaaaaaaagcctggcttttctgtgaggttattaatgtaaatataccaagattgtacaaatgcaaaaaggaaaaaaaacctcagtgcctctaaattttatgactttgagcttcaggaccaagataaatagatttgatcagccctgtggcaagaaagagatgagccgaccccaaaacaaagaggaccagttgctttgataaaggcacctcagtgggtctcccaatgtgaatgaggctgagagttgttttagcagaaaaggggatgctactggtttccagcaagtagagaccagaagtgctgttcaacatcttacaatgcacaggacagtccccacaccaaagaattatccatcccaaatgccaactgtgccaagattgagaagccctgttctaatctcacctctgctctgtgatgcaagtattattatttccacccttcagagcaaggaaactaaattcccaacagttctaaataacttgctaggatgcaggagaaccaggaatcacacccacgtgtctggcttcaaacccagcatttgctccatgatcgtggaaagatcattacacgaaggtaccaactgctgggttgtagcatcactttgtaaacttgggttgccacttgactctgaccaagcctgggtttccttgcacgtacccccattggtccttctcttctatgtccttgggctgttaaacaagcgcaaggcattgcatgtgtagatggtgtactttccaccctctaagcagtctctggatagggaaggctcccagtcctgagcggcactctgctgtgtgtgtctttgtgtctgcgtggtcaaggagagctgtgtgtgccacaacagggagcctgtggtcttcctgagatgaatgggttttccatgggaaggctgcaagtcgttgtgacatcttccagcgaggatttgggagtgtgacttgtgcgtaacagaaggtggtttgggaaagtagcactgtcaagtcctcagcagccggccaaccttctgagctgcagtgacagctcacgggggactatcagaataggaacacaccaaattcctaaggcttgagggatctgcctgaggctgcacagccttcaagtggcatagcgggctattcctaagaaggaaagtgttcctctcttacaggttaatgcccgtagtagcagtaggtagtagtaggtagtagtttcatcaaaccccacatcaaaactgctatgtctaaagcaatcgttgacaggcaaggctggttctgtgctgaggaacggccatggttcgcaatttaactggagaggagagctagagttagaggtggagatggaacaatctaaggtggagaatcaaggggggcctcctttgatgtctacagaatgaagtccagccccatcactgtactgctggaggctcacagtctagccccagcatgagttttcatctgtaatccccattactgcccctttgaccctctccagctgcagcagttgggccactcattcactcttgaagataatctgaatatttccacttctctgcccttttctgagtgccttccaacttgcactctgcctctgtctttcctgttcttctcaaaggagctcagtggagatgccaaaccacaaggcctttctgctcatcacagtcagtgtcgatgtctccctgccagagccccctagcaagctgcttacctgcttctcttttgctgtacttgtcctgccctgctctgtagctctggctggatttgagagtgaatgtgcccgactttattgattagattgcaagcatacacttcttgaaggtggtcatgagaacacaagtaaaacgttgatcctgattcctgacccactgtggacacccttgaaatatagtttgcctaccttcacttctcccctttgtaaactgggggtcattttttgtactttgagattatcacagtagatagcacacaacaggcagttaatacacataaattaagaaactaaaattcaggggccaggcatggtggttcacgcctgtaatcctagcaccctgggaggctgaggtgggtggatcacctgaggtcaggaattccagaccagcctggccaacatggtgaaaccccacctctactaaaaatacaaaaaattagccaggcatggtggcgggcgcctgtaatcccagctacctggaaggctgaggcaggagaattgcttgaacccatgaggcggaggttacagtgagctgagatttcgccatggcacttcagcctgggtgacaagagtaaaactctgtctcaaaagaaaaaaaaaaatagattccagcctggacaggatttgggagctgagctggtggtcaggccagcatgcagggactctgtagggggatctcccatacccaagagaagagggggacagaattagtggggagcctcttccccaaccctagactttctccccacacactagcatttaagcctgttaggaaatgagtaatctcacatagttcaaattcccttgtgaatttcaggtagggtcagaaataagcactttgagcagcagcaacaaataagagggttgcagctcttggaccttttaaggtacaatggcaccctaagagctccaggctgaggggaggagactggagcttacctccttgatctttttcgggttcagagccctcacctgggatgtgagaatttgtcctagagggggctggttggtcccctcggctctagcagcccatggttctgtgatatggggcgtgggttttcacatatgacagctatttacttggtttcccaaatgacttgtgaccaggccctaacatttccatgaacctcactatggcccatctttaagggtgtgaatgaggtatatcaggcaggattttctattattccttatcagtttcaagggaggaagctctctgtgtttactggtgggctccttgcagggaaaattacatgtccttacaaattagaatgaggaccttttataagttatactttagtaacaaggatgataataaagacactgtccacagttttttccccatattgttttctattcaagggagtataacaattgcaaaattaacaaaaccttatgatgtggtggttttacaaacacggaggtcaaatgacgtaaatgtcaagaattgtcttagtctttttggtttgaaaaccaaaatcaaacgtgagtgagtcattctttcttcggagaatttcaaatcactaaaaaactgcaagtattttccctgcgatctcattcactcatcccttatactcctaagagcttgcattccatgataaaaatggaatttacttgggaaagtttaattactgttaacatttttcatttcattgaattacttgcactcaaagttctagaactcagtctcactatcactcacacagctgtgttttaggacattttctacctgtagcctgatacatggttcagaacaataatttttatgtccccaaagttcacttaagtcaattgtgttccattttgatgtaaacaagttccagtgacaattagaagttggcaaaggtggtctttcaacccctgagcttgttgggtttgcttttttgttcttcttgctatatcttcctcctccaagaactctctggctcattttgttactactggagaattccctggtaaatgaagtccctgtcagagatggcagactcagatgtccttggggaacagctggtgacctgaatgtagtaatggggagaggaggtgctcaggatggggctactaggagctggacggtgcatttgtcatttaaaggcatcagaattcagaatttttaaaaaacccagtgcctagcaattaaacacactccccagtaaaattcagcccaccagcttccagtttataatgtgggcttagcttgttaaagtgtcccccctgtgtcaagaacaggaaccttgatttctgaagaataaaaaacttgcaaaagttaaagcctgaatcttcagctataggatgatctgtgtaggcttgagtaaggatttctttcttttttaaattctttttctttttttttttcttttttgagatggagtctctctcattcaggctggagtgtcgtggcgctatcttggctcactgcaacctctgcctcctgggttcaagcaattcttctgcctcagcctcccgagtagctgggactacaggcacccccaccgcacttggctaatgtttgtatttttagtagagatgggattttgccatgttggccaggctggtctcaaactcctgacctcaggtgatctgccaacctcagcgtcccaaactgctgggattacaggcgtgagccaccacgcctggccttgagtaaggatttctggacagggtttgggaggcctagagagtaaaggaaggatccctgcctatcatttaatgctttttggcgtattaataaattatagtggtagaagtagcagcagcagctgatgtctacatgggaaaataactccaactaactaacatcatttcagtagactgagaaatatctctttaaatccagcatccgtgcatgagaaaagagagaaaagaagcttttatctgcctactacactgtagaatgtattacctattttccaaacagaccgagtctacgtatagagctaacataacaagactctcccctgggaatcctagttgtggtttgggtctgaaggcagttttgggcacatctgccctggtcagtcacctcattaacttgtcagtgatttgcaacagggcctttggtctcctcatgtggagttcaattccacagcaacaactgccaaactgtgtgacccagcatgacccaggccaggctgggtgcggagctcagcaaatgcagggccacactgaacttgttattggcaagaaataagggctagcgatacaggtgcactcaaaagcagggcacagtttgggggaaataatctactatataggaaaatagaaagcacttagtataagaatacctctttagtacaaatgtaacgtctgactaattagctaagatgaggaattataatggttttaggaaataaaagcaaatttctcctttcaaacaaccatattcaataatttgccaagaaatccacaaacagctgtctccaaggtgcttatttctctataacacaatcttttttttgtttattttttattttttagacagagtcttgctctgttgccaggctggagtgcagtggtgcaatcttggctcactgcaacttccacctcctgtgttcaagcgattctcctgcctcagcctcccaagtagctgggattacaggcacacaccaccatgcccggctaatttttgtatttttagtagagccgggatttcaccatgttgactaggctggtcttgaattcctggcctcaagagatctgcccatctcggcctcccaaagtgctgggattacaggcaagagccactgcactcgtcctctatcatacaatcttaatggcaacgaataataataccaataataatagctttccattcattcggcaagtaaccattgagcacttgccacatgccaggcatccaaccaggccatggaggcctcagtcgtaaagaagaaagtccctgcagcctggagctcagagccaaaccgagagacagacaagactcccctccggccactatttctggctgcctgaggagcgccaggcactgtttgaggtgctcaagtcacatcagggaaaagatgagacaaaaatccttgctccctccccaggtggacaatttggtgccctggcttgctttgcatgggagcatatcggggtcagggcacagggagctgtgggttagcacttgagcttgaaccgggtggaattagaactctcctagccacagtctgaaggagaagccttctgtcagtttctatggctgtgtaacaaatgaccatatacatggtggcttaatacaacagaaatgtattctctagaggccagaagtccaaaagcaagctgctggcactgccaggctccctccacggctctgggggagaacctgctccttgcctccttccactccttctggtgtcagcagtccttggcattccttggttcctagcggcctcacttcagtctgtgcctctgtcttcacatcgcctgctcctctatgtgtccacatcaatctccctctgcgtcctccttataaaggtgcatgtagtagcatttagggcccacctaaatcacccaggagaaactcttcagctcaagaaccttcactttatcaggtcttttgccgtctaaggcaatagtcacaggctctgggcttaagacatgtcgtatctttttttgtggcgccattcagctccctacaagtgttcagacaaggggaacagcctccgcttgagccctgaagtgggaaggagacaggctagcatgtttgagggactgaaacgtgactagagagaaatttgaccacagtgggtaaggaacccggcagcatgcaatgcagcttaaaaagcagacaggggcagggtaggttggctcatgcctgtaatcccagcactttgggaggccaaggtgggtggatcatgaggtcaggagttcaacatcagcctggctaacatggcgaaaacctgtctctactaaaaaaatacaaaaattagctgggcatggtggtgggtgcctgtaataccagctactggggaggctgaggcagagaattgcttgaacctgggaggcagaggctgcagtgggccgagatcgtgccactgcactccagcctgggcgacagagtgagactccatcttaaaaaaaaaagaaagaaagaaaaaaaaaaaaaagcagacagattttcctgcataataagaaatttttgaaagattttaagaagggaagaagcagattggatttatgttataagatgatctggtgctgtttggaaaatgtggctggtggcaggtaggtaatgttagggaaaacctgttatgaggctgctgcagtcatgcaggtgggaagtcttggtggcttagcgagggggtgagtgtggagggtagggaagtggatgggaggtggacatatttgggaggcagacttgataggaatgaggagactcacctggcgcagttggggcaggcagttagaggcatgcgggcctcccaggagaggtgtaagctgctgtgcagacagtggtgcccgctcaggaagcacgtttcaggggcgatcatgagtccaggtttggacttgcagcgcttgtggtcagttggatatgtgactggcactcagaaagaaaggtctgggttagggagggacacggagggattgtctgtgggtgaaattgaccacttggaaatggatgctttggctggagagaaagtgacaagaagccagggcagccctgaagagctctgggggagactccaaacaggaggaagagggggccacaagacacaggtgggagcaaatcaaggcaaggccaaggggcagggatgctggagaacagggcaggcaagaaggagggagagttgagtgggttagagctagtcagggagcttaccaggagcccttagccttgtttaggccccgcagaagacgcagatgccatgttttaaaatgggaaaacccttctccaatggcctggagtaaggggtgaccttgttgttcagtggcaaagccatgtctcctggttctcagtgcagggttcttcccactgcaccatgctgcctcttaagaacacagtgaaaatctcgaatgagtgttactccaggctaaatccctcagttgcccctatttcattgtgaacaagtgcggttactttaaggtacaagaaaacactctgccactgaagtccagtctctggattgtctactgttgataacaccttttgttatttattttgataactcttcctggcacctaacgggcctttttcctgcaataggggaggctcctggaggcactgccaaaggattcgtgagtgatgttgtagtgtcacccagtggctgactggttgaattacaatcaagccttaaaaaggagggaagcattagaaaagaaaggaatgataataataatggattaagaataatgagactcataaaaaggatgaatatatttaaaagaatatttatttgttcattttaattgtggaagttttaattgatcatgtaatccatgagtatatgtttagaatttatactgtgcaagacagtggtcaagatgctgaggtggaaataaaaacgttcatgaatccctggctgcaaaaagtgtaccagaggccaggcgcagtggctcatgcctgtaatcctggcactttgggaggccgaggggggcggatcacttgaggtcgggagttcgagaccagcctggccaacatggcaaaacgccatctctgctaaaaatacaaaaattagccaggcgtggtggtggccgcctgtaatcccagctacttgggaggctgaggcaggagaattgcttgaactgggaggcagaggttgcagtgagctgagattgcaccactgtactccagcctgggtgacagagtgagactctgtctcaaaaaaaaaaaaaaaagtatactagaagacatcaccccaagcagatattaagcaaagtagcatgcacaaggcaataatgaaaaataggtgatgacgttatttagtcattaattattttagggtagatgtggtagtttggaggggagtgaaattgatgaggactgcagttaaatggaagcagaaaccttgaagtcagaactgaacagcctcaggtcctttgtctcatgtctttgagtctcagcttcctcctttgggaatgaggtcgtagatacagggatgactttctgctttacagggtggtaaggattccatgagaagaatgtattaacacactgttgtgttgtgtctagatttgtacatggtggcagttattactgctactgttatgattataatatttttggagggatggcagaatttgagctacaggtaaagaaaggctactctgacctcatggaaacaagtgtgattggggcagagggtgggggtgtggaaactgcagggaataaggttggcgggtgtgcggaaaggagattgtccccattgcaggtgttggtgaaagcaatgacaccaggaaaggggtgactgaagaagattcattgacggttgcatggggcagtggggagaagatcagggttaaggagacgcgagagattggtgcttgtggaacccgtgcgagagttgacaagaccatgggccaggtgcttggcagtgggaggaaggtaagatgggagcatgagatttgggttttggttcaaatcgagatgtgattgacttggtcatgagaaggacatggagaatgagggaaagagggtgacaaggctggcagctggatggcgagcttagatgatgccaggaacagagttactctcttcagtgacagggaaggaggaggcagagggctgagctcagctttgacccaatgtgtgagatgaattaacaggggaagaggatgcaagaaagtttctagaaaacagttggggatataggataggaccagaaagttaaatttgagaaccacaaaaaatagaggtattcaattaattcaattaataacattgtgtcctaaagaaactttataaaagaacattgagtgtatctggatagactgtttttaagtgtaaaaataagaagaggcttgaagggattgaaacgtcactccgggcatggcatgagcgtgatttagtggatgaaccctccattgtgctaggctcaggctcaggtagggggaagaggagaggtttaggtgagagactgactggtccaggtgtgaatctgagcttgctaggtgtgagagcctgaataagttacaccttccttcatctatatggggatcatagcctacactattcagtgttgctggttgcattaaataaggtaaggtatggagcatggcagccacataatccataaccaagcctaataaatacattccttccccttcctgtgacattttttatgataaatgtcatggtcttaagagttcaagggtgatttggaaaatctgtataattagtataacaaaagcatctttcctgtttgttcagtttttcatttatttataccttgcactgatttataccttgcatttatttataccttctggctaagaaagagcaggaagtcatggcagaaaaagtgtggctgtacctgtatttgtagttgtttatttgtagtgtttctcctagtgctcctactgacaaaatgacaaacgatttcttagatttttgtcattccccatatgttttggtccctggggcaaccagatcattgccagccaaaaaggctgacttgaagattttggtttttaaaaagtacagtacataccctcttatcttttggtctcttttactaagttgttatgaaataaaagtaattttatcttagccctgttcaagagacattctagacttaggcaaccgacaagggacaaaatcctaaaggaatgccctggcttcagaagacagggaggccggcggttctgtgtctgctctcatctccttcatcctttatttgtacagctggcccgagagcctactgctgctctagggaggcgcaaataacaggtttgatgatacggtgtcaatttggcctttgaaccaaaagaaagaaagaaagagatgatctagtggcttcacatggcatgccaaagtctcctcagctgtcaagctgattgtcatttctggattcagcggctctgtcttctgacttcgaagctgcagaggcagttgcatgcgcacgtagccaaaaaaacccaggggtgctgtgcatctgaaagccagtcattccactgggtggtttttctctttttgctagactgactctggcacagcaacttgttttatagcaggttattgttggtggtggagagtgcagggttaggactgggtgaaatatttctttaaagactttttttagtgatgcaaaattcctgtgattatttaatgattctctagttataaaaatgtcttttatgggcctgctacttatgtctatttgtcctgaagtgaattctattataaccttatgaaaaagtaagcctacatatttacctgtaagcacaagttcttttactgacccattcttttacatgaaacaatttaaagaaaatagaattattctctgtatgctgtgaataaattatttactcaaattaggtgaactaacaaatgactatttcaaagattggtgtttgggaaattttggtgagcagctttctgacagattttgtgctgttatttgaggtttaatgtatttcctttaaaaatttatcatgtagcaaaatacttattaaaatacaaaaaaaccgcactaaatacaaaatcacaaagtcttcacagttgtaaaaaaggagaaatttatgttagtttttccacttgcaaagtaggggtagtgtttgccattgcatatggttgaaataaaggcataacaacacctacattatagctcaacagcaaaaaacaccaacatctctgttattcagagtcattgctcatggtgtgaagttgtactctgcacagtttgctgtggaatcattgccattttgcataattactgttaaccaacgttctaggaatgacaattcagagacataagacagcatttacacttatctctttgcatccatgaggaattggttccagttcccctctggataccaaaatccatggatactcacgtccctgatacgaaattgcatagtatctgcatataacctatgcacatcctcccaaatactacaaatcatttctaggttatttagaattctatgtaaatgctatatacagtatacagttgttatactgtattttaaaatttttaatttttgttgtattgttcttttctgtttattgattttcgaatattttccatctggatcggttgagtcctcagaacgggagccagggatatggagggccgcctgtcttgccttggggtagaagtgggctaccttattattttataaagagtttgttgttctctgcctttcttaccatcatgaccttgggcacttagactcggccttcccctccaggagcagaggttgggtggctgtgggcttgggagggacagacaagtgaagagggtatgatagtcacgggtgagagtgttactgcagaggcaccttggagaggcatctccttctccagaacaggggcaggagatcaggggaatctttccactgcagccttgagagatgaatcagccagaggcagagagggggcgctcccgggacaggacagcctgcgcaaatgctgtgaaagaacagagcttgtctagaaatctggtgcagggaggtcagggtggcaggctgggaggagggaggagatggtgagagagaggagttagcatccttcaataatgcaaataaccattccctgctttactttttttttttcctcccgaagtattttatatgggcagggtgcagtggctcacacctgtaatcccagcactttgggaggccaaggcaggaggatcacttgaggtcaggagttcgagatcagcctggccaacacagtgaaacccagtctctactaaaaatacaaaatttagacgggtgtgatggcgcgcgcctgtggtcccagctacggggggaggctgaggcagtagaatcgcttgaatctgggaggcagaggttgcagtgagctgagatcacaccactgcactccagcctgggagaaagagcgagactccatctcaagaaaaaaaacaaaaaaaaaataaagtattttatatggcattttctcaaatcagcacacgtttctatactaaatggagttttattattcttaactgttgtgttaaatatttccacgccttttttcccctctgcaaacttcccattagctcactggatttggtattgcatgcctaaaatgaaacacattaaagagatttatagtcagttaattggctctctctttttcagttacccttttatattcaagcatgcattttagtatgtatctaaataatacattactgtaaagtactgcattcacaaaagataatttggggaagtttatgtataaactgcatgcaagatgaaaagataattcccaaacttaatgaaaaagtatttatttcctgaattttatatgtagaaaacatgggagcttttagattatgttaattaatcttatttctaacacaggttagacagaaaggtgctctgaagtcattgtttgtttttacttttagatcgtagtttagaatttgtgcagtcacctattgtaagttgataaaccctcacaataccccaaatggtttgtgctcacgtaattacactttgtattttattgttgtctttttcataatacatatttatgtatttaagtttcctttaaaattctaagcttttagcatttatatggatactcaataaatagtagctatttaacaatgatgaatgagcatgaagaaaagggaaaatgcctataaaatatagttttgatttgtaaaatttaggcagatgttaaaggttgtcaatcatgtttgtcgagttaatgacttaatggtgagcaagaagtggtaactaatctttattataaaatcacttctgctgatggtaagatgtacacaaagtatgaggttggtgaagaagtaattgcggtctttgccattgcttttaaaaggcaaaaaccacaattacttttgcaccaacctcatagaatgtaaaattgccctggcttgtgttttcacttatgagacatgcagtttcttttatgtcctagaaatgttcatttataaacatctatttagggaaagtgtctgttcttttgtttctctactggtgggattatatgacatactattctgtggcttgtttttctcctttaacaattatccatttataataataatatataataacaatagttagcatttgttatgccaggcactatgctaaacaccattacatgcattattctttttatgctcataagccattgacagataaagatgccaaggaacagagaggttaagaaacatacccaaggtcacacagcaagtcagtgtggtcctgggcttcaaacccaggaggctgacgcatagcctgggtgctcactctgtttctccctcatgagcttggggaggatgttctatgtcggcctgaacagatggactttgctggcagcttgcacgtgcttttggggtcccacacgtcttcctcagacctgttgtttctgtgctcaggctctgggggacttcagctgctggcatctgtgtctgtcagggctttatccaaagccccggaggcacagttggcaggcactccatacccatcaccagggccctcagccaaggagataaatacccccactcccttcccctagggcgggataacactgagatgtgggctcccctcagggttaagtcccaggtgcccacagtataactgacctgaaactgcccctttcttggctgccttcacttccgtgggtcgcgctctgttcctgacctgcacctccttcacttctcaaatggagaagttggtctcattgacttctcatcctctgtgttgctcctggagcaccctgatgaagtcaggctgtgagggctttcctgtttgaaggcaccctaatttattcactgagtctcaggttggtgcctttcccgtggatttccggtttctcttgctattgcatataacactgtggtgaatgttcttgcactatttttacggggctcctgccccatctccctcctggtgtctgggcctggccaaggccagcagcactatctaaagtgacatcccacctgggcatggtggcttacacctgtaattccagcactttgggaagctgaaggcaagcggatcacctgaggtcaggagttcgagaccagcctggccaacatactgaaacccagtctctactaaaaatacaaaaattagccaggtgtggtggcatgcaactgtaatcccagctacttgggaggctgaggtgggaggatcacttgaactcgggaggtggaggctgcagtgagccgcgatcacaccactgcactccagcctgggaaacagagtgagaccctgtctcaaaaaaaaataataataataaataaaaataaacaaagtgacaccccaagtgtggatcaggaccaggtgggtcttagttactgtttcttctcgtcaaggtgctctctgaccttctacccaatgtggggttgaccacatgaggagctctggccttcatgctatgcgattgtctggggccctttggttgagccctggttttggagggtggctgcctagcagaacacttccatttgcccatgaagtatttccttgatgggactgcacaacattgggttgccagagtagggctggcatgctgatttcgggtgactccagtttttatatagatgcgactctgcaagaaatattttgctcagggccctgcattcccaaggggcaaccctgtattagccctggagacctaagacatctgatctgagcagatatctcctaaaccctgccaagcttttctgtccatacatcaagacttacttgcttatttaatgcagtcatccatgctgttttgtgaagcaagaagttataaaataatttttcttaaatctttgcaaaaattttgagaggtatgaaatattgcaagtcgaactcttgacctcaggtgatctgcccgcctcggcctcccagagtgctgggattacaggtgtgagccactgcacctggtcgggatatcgctttagatggtgctgctggccttggccaggcccagaccccagaagggagatggggcagggccctgagacatgggttctgaggtaggagccccataaagcttcttcacttaaaacaagaggtggccttttcattcatggaaagttggattacataaatttaatgtgacatggagactaattccaaaatatgactaagaaattagataaaagcagccaaaaaagaaatgttgtccttcgaaagggcaggcaaatcattagttatttgaagtaaataaaagatctggcagtttcccttactctatttgtgtcacgaacataaaggtaaataaaactttgattttttagtttcttgcttcattaaaaagcccaagatctctaaatttgattgacagaatgaaaatagtaagataactataatcacttgatatatgtgtttctgtgcacacacatacatacatactgcacacatacatacatatacacatgtgcagtaattgaaatttatcatatagcttaattcagattaaaaagggcaatgccactatttcttatgttttaagtcaatcattttcttttcttgtcttgtttttcctttcatttccttttccttttatcttttcttgtctttcttttcttttctttttttttttttttgagatagggtctgtctctgtcacccaggctgtagtgcagtggtgcgatcagctcactgcaacctcggcttcctaggctcaagtgattctccacctcagcctcccgaatagctgggactacaggcccacgccaccatgcccagctaatttttatattttctgtagagatggggggtctcactttgttgcccacgctggtcttgaattcctgagctcgagtgaacctcgttgtctcggcctcccaaagtgctgggattacaggtgtgagccaccatctccagccatttgtttctattattagagttgtgcaaatctaatttccaagtcttctgtaggcctgaatgagtatatgtttgtgttagaagacagtaattaagaattgcacccccatttctttttaatcttccttctcagggtccaccaggaccaccagggccacagggtccaattggacccctgggagccccaggacccattgggctttcaggagagaaaggaatgagaggggaccgcggccctcctggagcagcaggggacaaaggagataaggtaagccacatcttatgtggagattcacatgaaagactcaccagcactactgcaccattttttgtttttgttttttttagacagtcttactctgtcactcaggctagaatgcagtggtgggatctcagctcactgcagccttcgcctcccaggttcaagcgagcctcccacctcagcctcccaagtagctgggattacaggcacataccaccatgtccagctaatttttgtattttttagtagagatggggtttcaccatattggccaggctggtctcgaactcctgacctcaagtgatctgcctgcctcggcctcccaaaatgctgtaattacaggcgttggccactgtgcctggccagcactggagttttataaccacgagtagtatatacttgaaccttataataaatgaagtccctgaactcctctgcaataattcatcctcatttttggcccctttccagaggagcatgctcttctggacctttaaatacatgtgtgtacccagtgagaagttatattgtttcatggctttttaaaaaacctacatgacattaattatatgcatcacactgagttttctcttttcactcaacaatatgtcttagagaccattccttatcaggctatgtagattgaacttattcctgaaaaaacattgtataatatgccatagtatgaataaaactatagtttattccctgttgatgagcacttgagattctaccccaactttgggtagtgcagatgtgcaaaaataatcctatcaattgcctgtgttcacagttaagggtttgttactctaggatcgagattcggagtgttagatttctgttcacagcatgttgaatgatttacttaaatcagtactgctaggctgttttcccaagtacaaaagaaaagcacaagaattggttcttaaatgttggcttttagactcatcatgtaaaaaataggtgacaatgactgctcagcatgtttaaagatgagtaattaattgttactattttcaagtaaatcagcttattaatttaataatttttatctctttgttttattttctgggattttagggtccaactggtgttcctggatttccaggtttagatggcatacctgtaagtatccctaaattttctccacttttttcaaaaaggcagaagtactcatcaaaatccttaaaaccacatgtatatatacataaaatatatatttatagaaaccacaatatatatattatatatagcaaatatttgctatatataccacaagcaacgtaatatatatatatctttcaccataatatatatctacatatataaaagatatatattagatatacaagatatagaatacattaggttggtgcaaaagtaattgcggtttttgctgttactttcaatcccccacaattacttttgcaccaaatatattgtatatataagatatgtatagtatgtatactatacaatatgtatcttatattttacatatataaaatctatagtatatacgatatatagctatcttacatatattttatatagtatcttatatcttacatatagtttatatatcataatatctgttaattatatattgtataacatgtataaaatatggtgcaagatatatatatgttatggtgcatggtatatattatacatagcaaactctttttatattttctcattttagtgcatgaaagggtgtttacatttaaattttgtacaataactcccagagcaaaacactttacttggaaagcaacgttttctaacaggttagagaaaaaattccaaaatatgagctaggtatacttgttatgtcaagtacaatgttcttgaaattaatgcatactcataaggaatgtttttatttgctgatgagtcctaatatttgtagtgagcttaatactcccatttctcatatgaaaatggaatggaaaaaaaaaaagaggtatgtgggggctttataattcattatagtatttctaaggattttaaggaaggtcccctcctcaatttcccagagtactgcaaactaaattagtttaaatttgttatcttaaaaaaaatttaggttttatttttacatgctacgtagccttttggggtaaagagaaagtttcacaaaactaaacagtaaatgtgtgaatcacaattgccataatttgagtattcatattgcataacctttatgtaatgatattttcgcaaaaatgcttcacttataattttgttttctgcaggggcacccagggcctcctggacccagaggcaaacctggtatgagtggccacaatggctcaagaggtgacccagggtttccaggaggaagaggagctcttggcccaggaggccccctagtaagatacccacagttcatcttaacaggaatcttaagtgaacaggccctgtggtggaacaggcttgatgtattcaagaaacagagttaatacaagtgtgcctggagcattgtcaacaaatgggagtggctgggggataaggacagagagataggcaggacttagaacatgcaggactttgtggatgatggaaggaggctagattttcttatccatgttaggtaaaggcactggatggttttaaggaaggaagcaacatgatctgattgatgtttcattaagatgtctctggctgctgtgaagagaatagatagtagggaaaaaagagcagagagaccaggtagcaaaatgtaaattgtttatcattcagggttaattgcagaaacaaaccccactaggtattttgaacagaaagggatctgctacagggattctggcacttattataatagttggaagagtaaaacttaggaccacacgagaccactgatttcaaaggttcacagctagctgagatccggagtcaggaagctgtaactgcactgtaaccactgcctgtcaccccacgtctagacactagcaaacagaacactcaagtttctgctttcctgcttggcagcaacaacagaccaggaagagaatctcttccaaacttctgccttccacatctcctaggtggaacctaattcacatccagctataaaggagtctgggcaatgtagtttttatctttctagcccctgtaatgcaaaaaaatatattagaaaagatttggaatggatgtccagcaacagttgatagtatccagcacttgggggaaaacttacggctcttagctttttttttcttcagaattttggactttcatttaaacataactggagcaagagctaccccccatattccctttctttctctctttttctttttctcacttaaataaagatcagagattatttgacctttccaaattgtttttctgtgatttttttttttttagcatttctcccttccttaataaaatatcatttcacaagtttctttctagaaagttttcttagcatgaccaccataatcattcattctgctgtcactcacgagtcttccttttgctccagattctagaggaactgatctgaacactaaactcaaaaagaattttccatactcacatttttcttctggtatcaaataagaacatccaccacctttcattgttaagtttttcaaccatcctttactttcaaactcagccatttgaaaactcaagtgcagtctggtgaatgcacatttattaagctcctcaaatcaggccaaacctcattctacagattcatgagcattcaagagagcaagggttctcagttttaactttaacatagcatgcagtaccagccacaatcctgaagtttgtcataatggtctctttgcaaagcaaccaacttccccttgactcatttactatacagacacccctcactttgcacagtaaagtaagaatgaccaggcaagctaaaaaccacgcaaagaaaccttatcaactgatgagaaaattaatattgtcccatgacttttaaaatgttttgttaaaacattagaaactttgccagttatataaggaaatgaaaaaactaaatatttctttaatatactgtaatttgaagcattgagaaccaaagtgttttatttctttgtaaaaacttatcaagagtagtttcaacagtacttgcctttttctcatcatgtaacttgtgatactaaaggaatatgtcttttatgttttgaggaagtatgatactcctaagttcggatctgtttccagtgttgtgaaatatctctcagggttcctttaatgtgaagttttcatctgtgtcactttacctaggacgctgtcatccttttcatcacaaccactttcctggtttctctttactaagttcctctggctgcaaatagtctctcaaatgacaacaatctcattattcccatgatcagctattgcttctataactccacttatgttttatttgaatttcatttccagcattaccattttcatttctttgcttcattttcatcattattggccgatttcctcttccaactatccatttttgtaaaatgttatttgggtttattgctgggagataaggaggcaagccagctacaaactttgctgtctgtgtctgtgtgtgtgctctgaataatacgtgtgcaggggccaatcacagacagactttgacagaaatcattgaaactgacccattagtcccagagatgttctttggatcaacatagaaatggatccttctgatcttaaagtttgaaacctatgtgttttatctgagttccttcctcaggagaggacccccaggcctctcaagaagtatcaaagaactgaaacacaccagatcatggcatccagacaatgagatgccagacccctgattttgtttccttacctaggtcctgttttccaatacattgttacgtttcttccctgctatgtgaacccctaattttagtcagtccaggagatggatttgagactgatctcccaactcctcagctgcagcacctaattaaagccttcttccttggcagtagtcgtcctctcagtcattgactttctttgcaacatgttttggtaacatcacgtgatcatgcagtaatcacaattcacatctgttatttatatagcgatttgtgggctgagaggatagcaatgaagtttgtacgttatgcaagtactcaatacacaatggtgactgaaatttgaaccatgttgttggagaactggtgttatttaacttaactatgaaactgaaattcattcagactggaactgtgcaaagccaaaactgcagatactaccaaacctgatttctcaagtaaattgttgatgcaatttaaccttatgctgttaaatatctcccatcagaagccaagtcaagcactcctctaagagagattaactttgaaatgtatatatctttcatatgagcttgatatataaagatggtaggatttttatgtggtaaccaagagaagatatattaagaattgaagtaggggccgggcacagtggctcatgcctgtaatcccagcactttgggaggccgaggcgggtggatcacgaggtcaggagattgagaccatcctggctaacatggtgaaaccccgtctctactaaaaaatacaaaaaaattagccaggcacggtggtgggtgcctgtagtcccagctacttgggaggctgaggcaggagaatggcaggaacccgggaggcagagtttgcagtgagcagagatcgcgccactgcactccagcctggtagacagagcgagactctgtctcaaaaaaaaaaaaaaaaaaagaattaaagtaggatattaagatattaagtaggaaaaccttggggaggggaagaatacactgaggttatttcattcacttttaaaaaatatcctaagcaaactagcaactatatacaaaaaccttctgaaaggaacatgttatgtttttaaaaataattcttaggcctattttgaatacaagtactgaaatggataaaatctctctctctatatatatatatacgttttactgtttctagggcataaattaacaattgcaaaattagttatttgtaggaacaatgcatgtgttttatattgtaaggaaatatgaaaattttctgctaaatagctatatatgagtagatattctgtcttagaagattccttaacagatcttaactgaatatggagtaaatatatgtgagaaccttagggtgataataatatggaagaggatacagaaatgtcttcttgttaatcatgtcaataatggtaattttaactgatgagttatattttatatagaaaagaaaatactgaaatggtaatatgctattttcctgttaagtacatacatattttattttcagggccatcctggggaaaagggagaaaaaggaaattcagtgttcattttaggtgccgttaaaggtattcaggtaagtattatgatcatgatgggttaaaaaattttttcttccaaataggtaagcccatgcaggaaatactcagacaggatttttcttcaaaatgtccctgaatacaccaatttttatcattaccctgaccctcagggatggcatcatgcttttgtgtgaaggcagtggctttagtcgccagtaaaattccagcactgtaaaattccattacttctgaactagtcagaactgcaagggatgtatttatttcaaggtttctcaactcctgacattgtgggccacatattcatttggtgtggggctgacttgtgcattataggatgttgagcagaatccctggcctctggcctctactcattagacgccaatagcatcccccacctctgaactccccaaagcgtatatccagacattaccaaatgtcccctggggggaaatcaccccagtggaggaccactgatttatttgtaattaaaacattgtaatattagtacttgccatccagtacagtaaaagtcaccattattgaacttgaaaatgatgtaaaccttatagcactttgcttgatacatttaatggtgttgtgttttcagcagggagtgatgtccaaatgttcagaaataaactcttgagtgaccacctcatctctcagatgagaagccatggatgagtgatggggatcagtggaaatgatgcattaacaggaaaatacagcccatgttcaagatgtgtggtcatttctcttaaggaagaatattctgcagcaattagatagaactagtcctagattgcttctatgagaccctaggttctgtgccacgcagaatggacacacctgagcagtgatccctttagtaagctcactgtttatgtgtgtagcctctgtgcctatttgtccttcttaaacagcaagaacgatggatttgtttatagcttaaatgatatattaataaactaaacgtcaacagcagggtcattctaggaaccaggatggtgtattggaaggagagaactgaggcttactctccactgtgactttaagcaactcccttaacctcctcagcctcatgttcgttatttgtgaaagaagattaaaataatatttaccctgcccctttcttagtgttgttaagactgttataataatttatattgcagcacattgtaaatggtaatgtcccatattagttatagtgagcatttttttgtaattgtggtaatagaggacatgtgacatacaaatatagaagggggatgaatatagagaattccttatcttaaggggaaacagaagatccctaataaaaatgacctgtagatcaataacctttgagagacaatgctcttaagagtctatatccactttatactcattctaatggctatgataaaaaaaacaaatctagcaattgttggcaactacatggagagttggagccttatgcattacgggtgggaatggacaatggtgcaacccctgtggaaaataatatggtaattcctcagtaaattaaacatagaattactatatgatccagcaattccacttctggatatataccccaaagaactgaaagcaaggacttgaatggatatttgtacatgcatgttcatagcagctttattcacagtagccaaaaggtggaagtaatcgtgtccatcaacagatgaatggataaacaaaatgtggtatattcatccaaaggaagactgtaaaagctttaaaaaggaaagatattctgacacatacaacaacatggatgaaccttgaagatataatattatgctaagtgaaataaaccagtcaaatatcatatgatttcacttatatagaaaaatagtcaaattcatacagatggaaaatagaagggtggttgccagtggctgcagggaagagggatggggagttagtgtttaatgagaacagagtttccactggaggagacataagagttttggagatggatggtggtcatgggtgaataacaatgtgaatgtacttaatgccacttaagtggcattaagtgaactacctgtacacttaaaaatggttgaaatgggccaggcgtggtggctcacgcctgtaatcccagcactttggaaggccaaggcgggtggattacctgaggtcaggagttcgagaccagcctggccaacatggtgaaaccccgtctactaaaaatacaaaaaaattagctgggcatggtggcgcatgcctgtaatcccagctatttgggaggctgaggcaggagaattgcttgaatccaggaggtggaggttgcagtgaagggagatggcgccactgcactccagcctgggtgacaagagcgagactccatctcaaaaaaaaaaaaaggttgaaatgtcatattttaacttacatatattttacattttaaaaaaagaggcttcattcaagagaatatatagcctttgatcttttaaagtaggttgagtctcagcacagagtcacaaggcgatagaagtagacagaggctggtgtgaggcaatttccacctgagtttcttttctgtccactctagggtagtcaagggggtcaagatgtttataaagcatagcaaggtgtggaaagacaccagcaacaggtaaactgtgaggaaacgggaccactggattgagaatttagaacaatttaaacaaagaaaaaatctcattttgattccatgtcattacttcagcgacctttctctgttgggtagaaggagaattcagagcttaaggagaaggaaaatcacctccgcatatcccttcctcaattttagtcaacaccaaaaaaattgaacaaactgcagttagatgagtccagataattttgtgtatatttctatttttacataatctctgttttaggaacattgtgtggacttaaagcaatgcattcttatttttgcagggagacagaggggacccaggactgcctggcttaccagtaagtctcctgagcaggctctatgcttctatttcctcctcaaatagcctatgatccacgttttaatcccagcaaagccagctacataatttgtgcggctcacctagtgcaaaatgaaaatgtgggttccctgttcaaaaattattaagcatttcaagatggcgaccacagaacatgaagcatggggccctgtgtaactgcaccagtctcatgcccatgaagctgtacttgaagctcatcaagctccctcctgccttcctcttctgtcttctaatgatctcgtgacattactcaggtatatgcagccacttaatatttaggaaagtgagtccacttagcaactacatgtataatatataccagctagaataatcttgcattgcttctcgctaccattttgcctggtgaatcagtatttgtatattatatttaatattttgcccatcttcatctctctgatgtttctgatgtgagaaagtttcacaaaactaaacagtaaatgtgtgaatcacaaatgccacaatttgagtattcatagtgcataatctttgtgttatgatatttttgcaaaaatgcttcacttataattttgttttctgtaggggcaccgagggccgcccagaccagcaattcaatgattatattagtctttccagtttttcgatgtttacaagactaaaattgagagcagttttgccggccaggcgtggtggctcatgcctgtaatcccagcactttgggaggccaaggcaggtggatcacgaggtcaggagtttgagaccagcctggccaacatggtgaaagcccctatctactaaaaatacgaaattagccaggcgtggtggcgcgtacctacaatcccagctactcaggaggctaagccagggaatcactcgaacccggaaggcagagcttgcagtaagctgagatggcaccattgcactccagcctgggcaacaagactgaaactccatctcaaaaaaaaaaaaaaaaaaaagactgggtgaggtggctcacacctgtaatcccagcactttgggaggctgaggcgggtggatcacgaggtcaggagttcaagaccagcctagccaagatggtgaaaccccgtctctactaaaaatacaaaaattagccagacgtggtggtgcgtggctgtaatcccagctacttgggaggctgaggcagagaactgctaaaactcaggaggcagaagatgcagtgagccaagatctcaccactgcactccagcctgggcgacagagactccattttgccttccaaaagttaagctataattttgccctgtaacttctggctagtgatggaacgactttcctgggctggtttccttactacgattgaagctcaggtccatgtaataaatgtgatacctcaatgttgctgttaaaataaatatcagttcatcctcctaaacagagtaatttcattatacactccccaatcatttgacctgggcagagtcagcaggagcccggggaacatctctccacacttccaggctagcctggctgtaacctttccttgacaatttgtgtatagttgtgttacaacttacatgttgtagaaaattttgtatggctgactcatcttgatctcaaattagggactatatttccgcaatttgagatcttgcagaccatgttttaaaaacatactaaaaagtataaatacattaatatataatgttaattaataataatactttaaaagcatcctgatgtatatcaaaattgtaacagaatttaggagtaggtagtaatgcattttctttgctctccacttttgttattacaggatgtatttgtaaataggtagattgatctctgggtcttaactggaccctaaatgaaggaatttatcacaactaccagagtgctgctacctttagcttggtgctttttttttttttttgagacagagtcttgctctttcgccaggctggagtgcagtggcacaatctcggctcactgcaatctccgattccctggttcaagcgattctcctgtctcagcctcccgagtagctgggactacaggcgcctgccaccacgcccatctaatttttgtatttttagtagagacggggtttcaccatgttggccaggatggtctcgatctcctgacctcgtgatctgccccacttggcctttcaaagtgctgggattacaggtgtgaaccaccgtgcccggactgcttggtgcccttttagggctgcatcaaagctgctgttgaaaatgtcctagcagggcagatgtgctggtggctgtgatttctttagaggtttttatccacatgggatcacacgcaactctttctgtgaaagatgattacaattttgggtaacagatgcactgatttttctcatgtttagggatcttggggtgcaggaggaccggcaggtcccacaggatatcctggagagccagggttagtggtaagtacagcactgctgatgtgatccctttaaaaaccagattctacatgaaaataaagaagcaacattgccattttgggtcagacacaggtgggccgtttgagagattataatcgatgaatcagtgaaaacccaccattatcagtgggactccatcttgaagcacaggtccctgcggatgagccactgacatcatcttcacagaaaacagcccatccatgatagaaactccatcactgcatgttttaaaattaagggtttcctaaataggaccctattttggggtaacaaaagaaggcacattctgatttctatgtctgatgattgatttgtgtttttttctcccttgatttagggacctccgggccaaccagggcgtccaggtttgaaggtaggcagtcatgagcaagatacatcaatagagccctgaacaatgaaatggttgaccactgatatttgtcagaatgatggctttcctcttatcagacttcccaaagtattccatgaactgcaatatattgtgtagccagaagtcttaattgcttttaattacttttttaaaattcaaaagcaattagattctttttcatttctttctcagggaaatcccggtgtgggagtaaaggggcaaatgggagacccggtaagaattccctcttgctctgaggagcagatggtgacgtgtgtgtgctgctcaggggtggaggctgttctgattatttgaacttgtactcattatctagtcactgcccaattttatggctgagaacttttctttgccgaattattatggcaccattacccttgactgtaaaatgaaagatctgacacaatttaacactactttcgggttaatttgtgcaacacatttcaccctagcaaacagattgaacatttttgacaatatattatgtccagagtaacagctttgtcaaatcacggatttgttttgcttaatttcacataaatcctaaactccacccttaaatatgcatataaatacaaatataaatgactggaaccaagagcactgagcaatacacaatctccaacccactccttttctatgcctgtcctccccgtctcctccccctgccactcacacccactgtccttttggccgacatgtaaaacttagtaagaataagctttagaaaagtgatttaagggctgagcacgatggctgatgcctgtaattccagcactttgggaggctgaggcgggtggatcatgaggtcaagagactgagaccatcctggccaacatggtgaaaccccgtctctactaaaaatacaaaaattagctgggcgtggtggtgcgtgcctgtagtcccaggtactcgggaggctgaagcaggagaattgcttgaacctgggaggtggagcttgcagtgagccaagattgtgccactgcactccagcctggtgacaaagcaagactctgtctcaaaaaaaaaaaaaaaaaaaagaaaagtgatttaagaaggcaactcacctggaaacaatctgaacatccagcagtaggtgagtggctctttcaacaactgagggcaagtcaatattaagcatctgctccatgccaagctaggactgacactgggtgtggggatttagcaagacagacctgatccctgctctcatggagttccagcgtgattgagtaagtcatggtacagtcatttaacagaacggcacaggagtcaaaaatatatataacaacttcatgatgtggggaagtgcctgtgatataatgctgaacagaaagtacaggttacaaaaatataaactcaactttgtaaaagcaacagcaacaagaaagacattaaaatatacacagagagggatttctcaacctcaggctgctgctatttcattgttgtggaggctgtcctgtgaattacaggatgtttagccacatccctggcctctccccactagatgtcagtagcatcccgtccctccaattgtgacaacttaaaatgtatcaaaacattgccaaatgtccctgtgggaaggggttgcctaactactttccccttcccccaaccttgagatctctggcttgtagaaatgactgaatgaaaatataccaaaacaatgtttttcaagtttgggaagccatggagctctggaatatgttcgtcgaagccacaggagcccgtgtgccattgcagaatccagcaagcattggcatcttagtgactttccgcgccagtccaatcagacacatttgcaaactcaggctgtggaataacttggaagtatttggctatgaggtggccattcaaatgatctcaaatgtgcttaccttaattcttttagattgtcaggtgaatgaacacataattttacaattttgggccaggcccagtggctcacgcctgtaatcccagtactttgggaggccgaggtgggtggatcacctcaggtcaggagttcgagaccagcctggcgaacatggcgaaaccccgtctctgctaaaaatacaaaaattagccgggcatggtggcgtgtgcctgtagtcccagctacttgggaggctgaggcaggagaattgcttgaacctgggaggtggcagttgcagtgagccaagattgtgccatttcactccagcctgggtgacagagtgagactacgtctcaaaaaatataaataaataaaataagataaaatattgatgcagaattctcagatgttctagagcatgtttgcccacctcattttaagaaacactgccctaaatggttgctatttatgcctacatgatataattatggaccttttacattttaattcttcatagttttccttctttgtacttttgactatgctgagtatatggtacttttacaatatgaaaaaaatagcagtatgaccaatattttgaagaagccggctgcttgtcagcttttaagggttttgttcaggtttatctcaattacaagaataagagtggctatctttaccaatacatgctatgcttttactcatgttttgttaatgtgcttgttcaatggtttattcacacagcagatatctttagggcaggtgctacaccaacactgtgttaggtgtgtagataaatcaaggaaaaaaaaacaaaacagacaatgtttctaatctggcttttcttcaatttcccaggtttaggtagaaattgaactcttttttttttttctatttaaacttgatattcttctaaaaattccacctatcaaaagcattagtagttttagtaatgatatattggggaatttactttgttaccctcaatacgggaagcattttatgtatattatctattcaatggaagaatagtttgaggtaggtaatattacaatctccatttcacagagaagaaaaatgaggtttcaaggaagtaaggaaatgaggactgagagaggttttaaggaacttgccccaagtgacagagccagtaagggcctggtttgcaaacatgggtgacctatgtatagcctgttcttaactatgacaaaaagaaagatcatactaagtgtagaataatagtaatacccagaaaagcacaaaatatttattttctaattaatggtgagaatttatgattgtggcaaaattcattcaagaaacattcttttcttcagtagaaaaacatctatcatggcataaataaaaattttggctattattttacagttttaaaatattattgaaaataaatagaaataatctaatctaaccagagtgagatggcttaatacatcacagtacattcttgtgatagattatttattggcactaaaaatcaggattgttacgtgaggccaggagtttgagaccagcctggccaacatggcgaaatcccatctctactgaaaatacaaaaattagctgggcacgatggtgcattatctgtaatcccaggtactcaggaggctgaggcacaagaatcacttgagcccgggaggcagaggttgcagtcagctgagattgcgccattgtgccccagcctgagtgacagagaacactctgtctcaaaaaaaaaaaaaaaaaaaaatcaggatcctgaagagattttagtataatagaaaaaggctcacaaaatattgtaagaaaaatataaaattatttaaaaatttaataaaatatgctgtatattttaaatcatgtttatatatttattatagtattctgattatattttcataaacataaaacaaattgtttattcacctatatacacatatatgtacatatatacacatatgtacacacaccaccaaaaattatatcaaagttttaataggccgggtgcggtggctcacgcttgtaatcccagcactttgggaggccgaggcgggcggatcacctgaggtccggagttcgagaccagcctgaccaacatggagaaacccccgtctctactaaaaatacaaaattagccgggcatggtggcgcatgcctgtaatcccagctactctggaggctgaggcaggagaatggcttgaacccgggaggcggaggttgctgtgagccgagatcgcgtcattgcactctggcctgggcaacaagagtgaaactccatctcaaaaaaaaaaaaaaaaaaagttttaatagagattacttctggatagtaggattttttatttatttatttatttattgagatggagtctcgctctgtcgcccaggctggagtgcagtggcacaatctctgctcactgcaagctccacctcccaggttcatgccattctcctgcctcagcctcccaagtagctgggactacaggcgcctgccaccacgcccggctaattttttttttttttttttgtatttttagtagagacggggtttcaccgtgttagccaggatggtctcgatctcctgacctcgtgatccacccacctcggcctcccaaagtgctcggattacaggcgtgagccaccgcgcctggccctggatagtagcattaagaatcattttcattttttaaatttatttttaacaataagtgtgtattaaatttttataagaaaataaatatccttttatattctatgatgtacttgccacaacttgtattttaaatccatgacacataggattggaagcattataccacaatacatgggtgaaaaccttcaaaacataaattaatatgaaattttcattatcttgcttttttttttaagggtgaggttggtcagcaaggttctcctggacccaccctgttggtagagccacctgacttttgtctctataaaggagaaaaggtaattcccaaatccatatgtcaccttggaaagtagcagtagaaaatattttttgacatggatctgtggcagcaaagtatagaggtctttctatgcatcactgcactagtttcaaacctactttaataagttggtactactgttggccccatcgtgcggcattgaaaatgaggcttggaaggttcccagtgttctcaagtttacccagctgctgagtggcagacctagctcaggctgctaaattatgacatgtgcttgttaatgttgttttgacgtgtggattgaaaagaccaccggaagcccagttgtcctttagatgttacagatgagtttgatgtcttgataattgagaaggtaacaaatgcatagaactgggccgtaatagattcttggcaaatattaattcctctgtcagctaccagtgctggtattattggtgccacatgaagattctattgttgcttttcaattgctgggttaaatttctttactttgctcaaaataagccactttttcaatggctgcattcccaaattgtatctgctgcctggttccgtggtccactgtggtatcccatatacctctcacatagagaactggctcaaatagtatctggtttataagtgtgctaattagaacaggtgaagagtaatctcttaagatttttttttttaaggtgaaacagattgtaaaaagagatgatttctgaaggagatggaattcagtatgttaaataataagaatagaccaaattatattcattgtaatttttagggtataaaaggaattcctggaatggttggactgccaggaccaccaggacgcaaggtagtttatttaagtacctttttttttttcatttgtgtgatgtactatcttaacttaaaatgttatttctcatggtctttatcattgctttaagtgctaatatatattaccagaatttttcactatcttatcataatactatagagcttctattctaaagtagttgttttctttaagctgctgacaataatttttgtttctcattttgttttttttccctattgctgaaatattgctttccctattgctgaaatattgttgcttgaacccctctaaatgttgtcatctcttaaagggagaatctggtattggggcaaaaggagaaaaaggtattcctggatttccagggcctcgggtaagcatcatttgctgttaacatcagtgaatttggagatatttctctttcatgtttttataaaaccaggtcagtagtcccacaagctcaaaagtgaagaatagctcatgtaagaacaaaacattttggacgagaattatggaatatctaaatatcccagagcatccttccattgacatcatttagataaaacaggcaagcaaaagatagaagaatttgggaaaagtgacaggattgtgccatctcttgtctggcacctcagtgccagtaggaaagtagcttggaatagttaatttaagtctatttgaggaaacaacatggtgatataggggcaggagctagaaaaaaagtacaatattaagctccaaacatcaccacatgtcactaatagaaagcccactcatagagtcaccatggaggccagaccgcagctggcatgggcattgagtttatttggttctagatttagtactgaatggggaaatattggtttccatggtcatttttattgctaatgatgcacagagcaactattaatttccaggcaaattatattgcagagattttaaagatatttggcccagtgcaagcactaagttaagtaaattaaatttggaaaagcaacgacaacaaaaatacattcttaattaaaacactggcaatgacatggattttttgaataagactgaggatcacttcaagtagcaaatgttataaagaaatggaatctattttatatttatttccttttattcagctagctttgcaaacaggaccaaatatccatggaacaatttgataaggtgaaaaatgatgcactgagctggttaatgcattctgatttaattctgtttatcctgatttttgtgaatttattagggggatcctggttcctatggatctccaggttttccaggattaaaggtaaatgtacctcattatagagataataaatacatttcattagtaaatgcaatttagtataattcagaagttgtactgttgcgtgcaaacacagtaattaggaaggcagacacattcattttatggattgcaggatttagctgtgggtgcaaaaattgaagcacaagattgtctgatgcaactgatgaacagtgttaagactttgcatggtctcagtgggcaatgtgttgcttaaattaaatgagaatgagataatttgtcacccagtcactttttttttttaaggcatgtttgtgcttgtttgtagggagaactaggactggttggagatcctgggctatttggattaattggcccaaaggtaaaaagtgagcctattttaatatatcctgataaaagtttatatccttaatattatctaatttatttttagaagtattgccaggaatcattcaagaatgtaatttttagaagagatacagttaattttttattcaattgttacattagtctgtttttcatgttgctgataaagacatatccaagactggacaatttacaaaagaaagaggttaaatggacttacagttccacgtggctggggaggcctcacaatcatggcagaaggcaagaaggagcaagtcacgtcttacatggatggcagcaggcaaagagagagtttgtacagggaaactcctattttttaaaaccattatcttgtgagactcattcactatcacaagaatagcacaggaaaggctgggcgtggtggctcaagcctgtaatcccagcactttgggaggccgaggcgggcagatcatgaggtcaggagatcgagaccatcctggctaacacagtgaaaccccgtctctactaaaaatacaaaaacaaaattagccaggcgtggtggtgggcgcctgtagtcccagctacttgggaggctgaggcaggagaatggcatgaacctgggaggtggagcttgcagtgagctgagatcacaccactgcactccatcctgggcaacagagtgagactccatctcaaaaaaaaaaaaaagaatagcgcaggaaagacccaccccccataattcaatcacctcccactgggttccttccacaacaggtgggaattgtaggagttaccattcaagatgagatttagctgggggcacagccaaaccatatcagttgtcccttgttatctgtgggagattagtttcagaacccctaggctaccaaaaccctcagatgctcaagtccctgatgtaaaatgatgtagtatttgcataatacttacacacgccatatcttatattttaaatcatctctaggttacttataatctctaatacaatgtaaatgctatgtaaacagttgtcatattctattgttttattatttttatcattggattgttattttttttaaaatattttttataagagtgctgactgtatagtactttaatgcatgctgtgtgttattatgcatgattatcatattatcatatcagtgtcatattaagcattattatgttctacatttgagaagtgatccttttgaaggtgaataatcatgagagtttaaaaaaattcataggctcattgagattagaaacagagggcatcttagagagttttctgcttttaacaccactgcattttttctttcctttttaacttttgtgacctcatctggcacttgctcagcatgtgcaagggaattgtgttcccttaaagccatggtggcattaaaggaacacaatttagagggacgctatttgttgctaaaataaaatgtagattcggaccttgttaggtgaataaactatttgtcatcgatgccaagttagacattaatgctcatggtatatctaagaaacttggtgacatcagaggtatccaatttataggcatagaataatttcactggagttaaatttcttttcctttgtagaagctttgtgacttgctatttacttccactacttgtagataagagattagatgcatctttgctgctcctaagactccatggatgcttcatttctctagtcagcctataatctctgcttcttatatgaatgtgcacatgatcgttctaatactggtttaatgccaggcaacatgagtaaaattaatattcctttaaaaagtgaatgaatgaatgatttcagggggatcctggaaatcgagggcacccaggaccaccaggtgttttggtgactccacctcttccactcaaaggtttgtgttcctattcagttcctccataaattatgcagaaataggagttgagtggccaggacagaagagtctggcccagtatttccatagcttgcacactaggcaggctgaatgcacgaactgtagcatgagtgtataattatacatgtgcatgaggtttttttcagtacatatactgtatgctgggatttttattgttatctttcagaaagtctatttttaatcgctaaaaattgtatgaaactattttactggctgggttcagtggctcacgcctgtaactctagtactttggaaggctgaggcaggcagatcacttgaggtcaggagttcgagaccagcctggccaacatggtgaaatcccatctctactaataatacaaaaattagctgggtgtggtggcacatgcttgtaatcccagctacgtgggaggctgaggcacgagaatcgcttgaacctgggaggtggaggttgcagtgagctgagatcatgcactcctgcctgggcgacagagggagactccgtctgaaaacaaaaacaaaaacaaaaacagaactatttgactaacacctatcaagatgctgccaccaaaaggagtagcctaaatcagtgacaaagaaccccattcaaagttcacgtgtctgaggaagaggcacagccaaggcggttcacatttaagatatttcgttttaaatgtaatgagaaactgcaaaaatgtctcctaattatactttactgagtctcacaaaaagtaattgttgtcttaattttaaaatgcacataccatttgtttattctcatgtaccattatctttggcaggcccaccaggggacccagggttccctggccgctatggagaaacaggggatgttggaccacctggtcccccaggtctcttgggcagaccaggggaagcctgtgcaggtacggatgccctgatgtgccctggcttttacaggtcagatttcctgcatcatcatcagcaccagtagctttcaactgtagctgatattggaatcaccttaggattgtgtaaaataataccgatgcctgtgcacaccccagaccaagaatgttagactcttgggagatgggcctggggatctgatactgtagaagcgctcctgtgtctgtaacatatagccaaggttaagaaccactgaactcaaaccaattaatcacttacttgggaggaatacaggtttctcagctgcaccccagaacattcaatcaatatcataggggtgttgtaaggaatatgtatgtataacaacaggcctcccacaaagttatcgcatgcagataaggcttggaaaccactgctaggattagtgtttccccatgttttcccaccctgctggaaggctctccctgttgacatctacttgtaaaatttagtacattcacctaatcccttgcttaaatctcctgcatgaaaggtggaagtaaaaattatgattaaaaaaactttcattcataattactttaaaaaagtcttcttccctcgcgtcaaaaacaaaaataagaaaatgatgggccacagtggcatttggtaaaaagcctgggaaagagtcctgttggcataaggactttgaactccttcaggtgctgcgctggttaatattcctagtaagattaggaattgaagtttagagggtatttgcagtctgtgaacccaggagaactgattaaacctgtgaggagaaaagtcttgagtaaacgtagttttacccagcctgtgtctcttgttatatttactgagaagaagtgagaaattttctgagatattcaactgctaactacaaaactcttgtttaatcttccatgaatctagctttcagtttgcaggattcaataaccacaaaggtggaaaagctttgtctagttcacttaacctttagatagcacagccttggcctaactgacccaggagtatataaataatatagagtattccgttggtcagaaagcactggactctggtcttagaattctccaatcaggcttgtttgtaatagaatagtgtctccagcatattaaaatgaagatctaatagtaagtaacaagtgtctctagtggattcaaacccaggaaacctcttaattcacaaggttttaaaaaataaattaacccaatagctttcaaatcttgactatgacccatagtaagaaatgcatttgattttacatttatatgaaaaacatatacatttatattacacaaacatgtatgtatccatatgtacaggtgattcagacaaaaatacacagaagtatacattttcggtatgtgacacactcttctatcccattcatttcttttataataaaaaaaatttaatgctgtcacaacttactctattgacttcatgctctacagttgggtggacaatactgcaagatgccacacactgtagcccattctccctgttggcaggtggttaagcattcttcttggcaatgggacaaggcagcaggcagcacccaggttcatccaatgactgattgtattgagtccacatcaggtcttagaaatggcatgaagacaagatggcagccaaatccacaggagctcattttcattttgttctaagcacaggagtgtatctagtcctattatatacttgtatatataatttgtagatatgatagatattattgttaatatctatggtatttactatatatacaacgtatagaatatcttgtagataatttggtaattatctacagtatttaccatgagataagcacagtttcagagtcagacacttgtaatcaaatcccaccttagcatttagtgaaagccatatagtataatgtggtacagtgaaatacttaatgcatttgcactatgaactagaaaagttccaatttctcctacttgcaagctgtgtgatcttggacatttattaaacctctctgtacatcagttttcttatctgtaaaacaagaccttggggttgaaagaaataatatgtatacagcctttagactgcagtctagtgtatagtaaagattcaatatattagctattattactacagatatttggcctaaactttgtgtgccttatctgtaaggtataaactttgcaggattgttcgaggagtgaatatgtttgtatgtctactgaagcccggcacatatggacacaataatgacagccattaatttaataaacatgctacattactgattactgacagggtttcagttatctcttgcggaaaaaatttcctaaaacctagtggtttgaaacaatagcaatcagtacagtacctctcactctttctgcagtttaagagttcaggaagggctgggcctgcctggacacctctctgatttctcttgtgtagcctcaggagcctccctgggtgggctctgtactaaggcttccttacaatatggtagcttcttatcattgcttatatggtagctcagaatttcagtctcaagtgttttggctcacaaggcagaagctgaatcatcttttctaatggcctcattcagagggaggcaacacacccaccttttgatagagaaatgtcaaagttcaacaagaggatgtaggacagagctcccgtgatggccatctgtcaaaaatgcagtcttccacagagaggatctggagccagacacgcttaggaaaaaagctgtgagaggtggtcactctcacagaggcttccggctatctttttttttgtttctttttgagatggagcttcgctcttgttgcctaggctagagtgcaagagtgcaatgacacgatcttggctcactgcaacctccgcctctcaggttcaagcgattctcctgcctcagcctcccaaatagctggcattacaggcacctgccaccatgcccaggtaatttttgtatttttagtagagatggggtttcaccattttggccaggctagtctcaaactcctgacctcaggtgatctgcctgcctcggcctcccaaagtattgggattacgggtgtgagccaccgggcctggccagctttcagctatctttaagccaaagacagcagcaaggggagcaggatgtcaaggggaagcaggatttcctgctgttgcattattcgttttgacctcatctgaacacactgaacattcactgagcatgtgctcttgctggatgttacactaagcttcttacatggattattttatttaatcctcataacaagcctctggaggtatatatacagaatgctcaataagttaaataaactgcttaaggtcccctgctacagagggaaaggccaagttgaaatctggtacctccatccttccccatcaacctgggctgctgtgataggtacaatattttatgttctacctagatgattacgtgagtctatatttttacccactaagtatgctaatatgtttatttggattatttttaccaagttatcaaggtagaaagattgaaaaactaatcatttaattaaatcaaatatgtttcttccccaataatcctaaagaatggggaaaaggtaagaaaatctgattctctaaacccatttctttccactgtgtgcttatttcaaaggaggcaagacattttaatggctgggatattgtctttatttttgagctatgttttttcttttaatgcagtttattcaaattattataactcctgctttacggctagtaatctgttctgtggaaaagcaaactttatacatcacttattttttttctacttctgaaagctgtcatctagagcattaggaaatagctttgtggagatatcactgacatataaaaattgtttatatttaagatacacagcttgatgttctgatatatgtatacattgtacaatgatcaccacattccagctaattaacctatttgtcacgtctacatagttatcatttgtggggggtggtgagaagatttattttagatctagcctcttagcaaaattcaaatataagatatagtattgttaactatcattttcacgctgtacagtagatctctggaacttatttatcttgcatgactaagactttgtaccctttgaccaacatcactccattcctctcttcccccagcccctgggaaccaccatcctactctctgcttttatgagtttgactatttcagattccacatataagtgagatcatgcagtatttctttctgtgtctggcttatttcacttagcataatgacctccagctccgtctctttccctttaaaaaattcgataacctaagcaagtgtgtaccaatcttgatttcttctacagagacgtttactctgagagtatatgtaattttcattcttgatttatcttgcaggcatgataggaccccctgggccacaaggatttcctggtcttcctgggcttccaggagaagctggtattcctgggagacctgattctgctccaggaaaaccagggaagccaggatcacctggcttgcctggagcaccaggcctgcagggcctcccaggatcaagtggtaaagtactccttattcatatccattagcatttatgctgcttttgatatttgcagtgccactaagaaagcatagtttttaaaatattttaaaagttatatgatgtttcatgagctaagttggttgtcttttacaaacaaataaactgaagttggactttcacatccattaaagtatgtgcaatcatttggttaggagtttcagtgtaaatgatagaacttggtaaaataataccaattttttttaaatgtagttttaattttcatcagagttatatatgggcttggtttgtgactgcccggtgggtttattttgcccactgcccagggagagccgatttgtcgagacaggggaattgcaatagagaaagcgtttaacatacatagagctggctaaatggaagactggagttttattattactaaaataataaatgaaataaaaataaaaataaaaaagcctctctgaaaatttggaggctagggttttttaaagatagtttggcaggcagggggctggggatgagatcatgggggtgtggaaaatggtcctaacgtgttgaatccacttctgggtgggtgccacgggacccttgagtcatgagtcttgggtctaggtggagccatccagtcatcagaaacgccaaagtctgaaaagacatctcaaaaggccaatcttaggttttataatagtgatatcatttataggagtaattggggagattgcaaatcttgtgacctctggaataataatgctgctaatcatttaagtatacctacatcttagcagaatacaggcccttcttgttttgttttgttttgttttgttttgtttacctggtggctttttattagcattatgaaggtagtttagttttggggagggctattattatttaaactataagtaaattctttcaaagttagcttggcccacgctcagaaatggccaagggcagtttagaggctaaagacaaggtgaagttatttaggtcatatctccttcactgtcacaattttttcactgtgagaatttttgcaagggcactttcaggtttaagagtcaaactgttctacaaggcatggtatggataactcaaatcccccacaactccttctcctaatccttcctctccaagggcaatcatttcaacacatgtggctggatattttgttatttgcctctatactgacattcaatgtacttgtattgctatttctcaatttttccaattcagcattatcttttgactttcctttacggaagatgaatttagctttctttcaccaacccctcacccgacatgtgcacattttctactcccacaaactacaatacaattattgtcataattttgcttccataaatattcagagtttacactgaatagttggttatataagggccattcaccagctgagccatataaagtataaattattgcttttccagaacatcttgtcaattgtcttgtttcctttgtctgtttgcttggttttcaatatacttataatttaacctcaaactgcccagaattatctaaatttcatcattatacactctaactcattaactattctattagtattagctctttgaataaatctctcctgcagctttttgagttgttcagattaggtcaggttgcattttttaatttgttgccagaatactgtcttgagatcttcctttaccaatatcctgagactttctttcctccatcctctctctttctctggggccctctatttcccatatattttttaatgctttactacctcattatatttcctgggaaaaagtgtaaataaaagggcaaagttgggagatcttgcttgtctgaaaatgccttaattctgctgtggactttgatttctagtttggctgagtataaaattttagttaggaaatctttctccctcaggattttgatggcattttctattgtttcctagcttccagtgttggctactgagaactcataacatttagatactttattttttggttttgaaatccattttcctttctggaagctcataggagctctttttttttgtttgtttttggggtcttaaattccacttgatttgccttagtgtgggtacatttgtactggcttgcacacagtcagtaagcagttttaatccagcatgtagctttcatgtcatgtcttttcttttcttttcttttcttttctttctttctttctttctttcttttttcttcctgagacagagtgttactcttgcccaggctggagtgcagtgatgcaatcttggttcactgcaacctctgcctccctggttcaagcgattcttctaccttagcctcctgagtagctgggatgacaggcacgtgccaccacacccagctaattttttgcattttttagtagagacagggtttcaccatgttggccaggctggtctcaaactcctgaccccaggtgatctgccccctttggcctcccaaagtgctgggattgtagatgtgagccaccgtgcctggccctatatccttcatttctgaaaatttttcttcaagtgtttctttgcattcaatcttagccaaaaggctgagaagagatcaagtgtcctttgaaaacgttgtctcctccattttttcccctcttttttctctttctgtactctatctatctgtcagaaaatcaatcctacatgtcttttttttttttttttaacctttactctattactctccagctgtttatttttctgtaacactttctgggagatttcctgaactctacattacaacccttcacctgaatttttaaatttctgctctcatgatctatttatatctatatctatatctatatctatatctatatctatatctatatctatatctgtttttcaattgctgtgttctcttttaatgtttccttttgtagcaggctgttcatgtttcagggatgcaatactctccctcatcttctgttttaattgtaaaataaattaaaatagcttgctgtgatgcgtgtttcttctaggtttttttggcggggatagtagggggtctattttctttccctgctgccaatttcaggaaggggatcttttggtctgtttttttagacaaatcatcctgttttggacctcactgttgttcttattccagaggtacagattcttgaaatttaggagacatttctggggtaaatcaggttctttctcagctttctaagcttcctgtttcaaattcagcttttttttttttttttaaggatctgccaagttcttttacttggttgttgctggttcctctccctttttccttgtcctgtgggtttatacttatttttatttatttatttattttatttatttacttatttatttattttgagatggagtctcattctgttgcccaggctggagtacagtggtgcgatctcagctcactgcaacctctgcctcccaggttcaagcgattctcctgccttggcctctcaagtagcggggattacaggcacgcaccaccgtggctggctaatttttgtgattttgcagagatggggggggttttaccatgttggccaggctggtctcaaactcctgacctcaagcaatccacccaccttggtctcccaaagtgctgggattacaggtgtgagccatcgcaccaggccagtttatgctttttttataatattcttttactctactgggatttggggaggatgccaaactgtttgcattttatctgtcgtctttaactgacatctctgaaattttatttctataagctctgcttttccattttcttcattagctaagaattgatcactgagtgggggaatatctttgccatacactgagtccatttttttgtttatttgttttgttttgttgtccattatcttgttttgcaacccattaatttaaggtagggctgagattagggttggctttatcaatggttatggtagcagaagcatgccataaccactgcatcatctatatgtgtgtatattcttatttcagacagaaagaatcctaggaaaacaagggcgcaaagaatggggttgggaaaggaagcacgtgggggaggatgtgagtgcaaaagtcacttattctatagaagacagtcagaaaaattatgtgattctctctgcccacccccttacctccttgacagtgatatactgtagtgttgggaaccccggaccacaaggaataaaaggcaaagttggtcccccaggaggaagaggcccaaaaggagaaaaaggcaagtaggcaccaaaggtagaatttctagaagacaactgtacatggatgatcgggggcatttctgagatgtgtaatgtggcatttcattcagatttgttactcaccttagtcacccactagagtactccattaagtgctatgtgattacaagtcactgaaaagtcaaagccttgtgtcttatatatttataaagccttgtgtcttatatattataaaagtcaaagccttgtgtcttatatatttatatatatgtatgtatatatatatatatatatatggaacatttgcctgccatgaattttgtctgcaaatggtgactttgctcacaaggtcctcttgattccttgagagtggcagtgataggacagtattgatgtttgatttttgtgggacctatatttcccagactcatcaattgcctgtctctctgcttctccactctaaattgtttggagccgttttgggcaactgagtcaggtgggtgtgacagcatcaacacagatgaggagtctgactaccctgaagacatttgtttaagacaaaaagtcctgataattggaaaatgcattgtggtgaattatcaattataatattcaatgcaatcaaaatccttcttcatgtattattttgtctccttaattgtttagggtttgtgcactcaccaattaattttttcagtttttttttcaggaggaaccaaaggatgggcttttaaacttttaaaaataaaaaagttgaattatttttaacgtttcttcagtagaattggatatcagcttttccctagaatttgtcaggataaatttattaaggaacgaaaccctccatttgtttagaaatggtatgcccaccctacatcccatgcctaggcaccccatgtagtgccccatgccacacccagcccccacagcacgtgctctcaattgtctgcaagaagtgcatatcggactctttgttcttcatttatgctattggttttgtacagtaaagcccttattggggattttattcaggaaatatgacaaatctgccattgatcctctgtctaggaaatgaaggactctgtgcctgtgagcctggacccatgggcccccctggccctccaggacttcctgggaggcaggggagtaagggagacttggggctccctggctggcttggaacaaaaggtgacccaggacctcctggtgctgaaggacctccagggctaccagtgagtacctcttaccagtcatctttccagttaaaagagacatggtattagtctgttttcacactaccataaagatactacccaagactaggtaatttattaaggaaagaggtttaattgactcgcagttctgtatgggtggggaggcctcaggaaacttacaatcatggcagaaggggaagccggcatgtcttacacgacagcaggtgacagagagcatgaacagggaagagccccttataaaaccatcagatctcatgagaactcactcactattgtgagaacagcatgggggaaaccctccccatgatccagtcaccttctaccaggtccctccctcaacacatggggattatggcgattacaattcgagatgagatttgggtggggtcacaaagccaaaccatatcagacacgtagagataaaaatcgaggtgcctctttctaatttattgtgtgatatatgatttatgttttgaacctacaaacattatgctaatgcctgcaaaaacagtttatttactcatccattcatccatcgtttacttattcaactaattggtattgttaagtgcctgctatgttctaggccttgtttcaggtgctggggatacagcagggaccagagcccagtctctgccctcctagagcttcagagaggacacagaccatctaacagatcagcaagtaaatatccagtatgtcatgtggtgataaacgccatcaccatcgattgtagctggagagaagagagagaggggcagagcaggaaatgaagtcaaggaactggcaggaggttaggaagggctgcagagcatggggctttacagatgggtgaggtctgagcctttactctagactacatgaaacagccaggggagagttttaagaagagtgagacaatagttttaaatggatcactcactctggttgctctgtggagcatagaccatatggataagggacattggctgggagatgagctgggaggctgctgtgtaatcctggtgagatatgacagccaatgccttaatgtggtggtgctgggtgtggtgcaaggtggtcagattctggatatattttgaagacagagccaacatgttggctgttagtttggacataggatataaggaaaagagaagtaagggacagaaccagggttttttgtttgagccactggaagaaggcagttgccatgtactgagatgggaaggcgatggaaggagtgggcattgggtgaggaaagaaagcagtactgtttgagacatttcaagtttgagatgcctattatacagtcaagtcaagaagtcaagtaggcagtaggatgatattcaacttaaggattcagatgagaggtttgggctggggatataaatactggctttgtcagagtttacgtgatatcatgccagagagtggatgagatttacctcaaggtggttctcatttggtgaaagttacagatgaagcaggttgaggcaaagcctctcagctgtctgattgctcataatgcaagcactgcccactggggtactcccctggagactggagagagccctctgtcccctccttattaacaaggctcaatcctgggatggcctggaacttgaccatcaagccccaaaggacttttttccattttccccagaaaatctcatgaaaataaggttccaacccgagggccttaagtgaagttaatgattaaggtgtcccagcagtacccttgtcacatgtacaaagcccactggccacctctgctcaataggaagctaggtccttaatgcatgtatgtgcataagcatggttgcaattgttaagtagtttgcattcaacattttaccatagtcatttttgtgtgtgttggtacttaatcttcttagtgaagattttaatggctctaaaatatttttgcggcttcctgttgagttgctacttagggctaacatctttgagtgaggactgcttgtttatctagggttatcatggctaaggtttacttaattcagttgctctatggggctttcctttgtaggctggccacgtttctgattgtgtatctggtctgttgtgtatatgattctgtccatatggcttctctgcattaaattcattacattgtggtcatagtcagggaccagggtcataccatggggcactagggaaggaaagggtagagaagggagggaagggggaggagaaggggaagagagagaagaaaaggaagggaaagaaagaaaggaaaggaaggagggaagaaaagaagggaaaggaggaagggaaggacagacagaagagcatgaaagacggtgcagactatggggtgctctcgctcttgggggctctccatcctccctacatctcctctctctggagatggtctgcttgtctctggccctagcagccacagattggtaggaaagaagaaaacagaaaactaggcttaagttctttgcaattgtttgtataattgaaccaagtctttgcattcattgccttagcctgacggcgctccctaggatgggatttccggccaggatgctctagtgcaaggcactagggcctaggagcaagtggaccagcttcagatcccatctccgacatttgggagctctgcagtcttctaagttttacttgcagcatttataaaatggatataagaacaccatcttagaggcttgttggtaagaattcaattgagtcatgtgttttgcacactgtataaggtacataccagtgaattaaagtccaggaggctgcagagcgaaccaaaggtcgcaaactgtcacaggctgataacgtttggatgtgtgccccctccaaatctcatgttgaaatgtaatccccagtgtttgaggtggggcctggtgggaggtgttttggtcatgggggtggatccctcacgaatggcttagctccatccctttggtgatgaatgagttcttagttcttgctcagttagttcacaggagatctggttgttcaaaggagtctgggacctcctgctttcctctcttgctccctctctcaccatgtgatacactggcttcccacttcaccttccgccatgattggaagcttcctgagggcttaccagaagctgagcagatgctggtgccaggcttgtacagtctgcagaaccatgagccccttttctttacaaattacccggcctcaggtatttctttatagcgaagcaaaagtggactaatatatgggctatttctgacctgctggaatgtttggttgtgtcctcatggtgtttgtttttgagttattaatgtgaggtttatggcttctcctgagatattagaagtttatgaacacaaggttattgcgttcccactgctgctgtggctgcgggttgattccccccatgcctacccacctgttccccttggactggacaggcgccacccctgtaggcatctgcagttgatgtcccttatctagactgaacaactaggatatgcctggcagagaggaagtgttttttttgtttcgttttgcttttgtttttttttttggtggaatttcactcttgtcgcccaggctggagtgcaatggtgcaatctcagctcaccgcaacatctgcctcccgggttcaggcgattctgctgcctcagcctctcgagtagctgagactacaggcatgtaccaccacacccagctaattttgtatttttagtagagacagggtttcacctttttggtcaggctggtcttgaactcctgacctcaggtgatcttcccacttcagcctcccaaagtgctgggattacaggcatgagccaccgtgcccagcccggagaggagtttttgttgctgctgggcttccgttgttagagtaacacaagtgtttggtgatctcaggtcttaagattgtaaaaagtagctctctgtctgaagctgctgagaacctttgccccaggaatcgcttaggttacacatttatttcactagttaactgctgtattctcagtactcagagtaatgcctggttctttgtagttttcaaagaaaactacagtaatggttttagtaatgtttagtaacatttactaaacaatggtttagtaatggttcagtaatgttttcagtaaatgtttctttaatgaagtccagtaatagttttccttactagctcaaataagtctatgatctactctagtacttaaaattcgacacctacagagcattagagcaattcgtcatacatttgaagtctccaatgtgctgagtaatacactgctcagactcctgggatgggttcattcttccaaggtaccaaagtcttatttattaagcattccacttttttctctttctggaaagaaatttgtccaaatgctatgtgaacagttttctgtcctgataatttattcttcagaagggcattttctttatccatttcttgggcaggataccatatgacatacactttggccaggccccactgctacttatgactagcatatatagtaaaaataagaataaaagaaaacccaacctacattagtactttatgatttctaattctttctaatatattgatttatactaagaaatttgttctacccacctttttgatggttcacagacattgctacaaacaggatgctatactagagtgatatcagagatattgagttatgtgtggacatactttttttctctgcatgaaatggcttccaaccctgttgtccatttgagtttttatgtctgttgtttgcatttttggcttcctcttcactgttactgcctgatgattgctgatgccactgtgcccatctccactggtaccctcctcccctctatagctctcagcttataaattagtacagccggttaaaaaaagatagttaagcttgcttgaacacattgttagattgtgtgaaaataagacaagaccaggtgtggtggcttactcctgtagcctcaacactttcagaggcagcaggatcccttaaggctaggagtttgagaccagcctgggcaatacagcaagaccccatctctacacacaaaaaagtaaaatccaattagccaggcatggtggcatgcacctgcagttctagctaactgagaggctgaggtaggaggattgcttgagcccagaggtttaaggctgcagtgagttatgattgtgccactgcactgcagcctgggggatgaagtgagaccccgtctcaaaaaaagaaaataaataaaaagaaaatacgacaaggtagtggcatctgtgtgagcaaagcaactggcttgctcagtcatttttacctccctccaatttctttgctgtggttttttgattattgatatcactaggtaagtaaccttgggctctgtatagtgtttctataatggtatttgaaatggtgcttggccaccctaatatactgacaataggttcatatatatatattttttgacacagagtcttgctctgtcacccaggctggagtacagtggcacgatctcagctcactgcaacctccacctcctgggttcaagtgattcttatgcctcagcctcccaagtagctatgactacaggtgtgcaccatcacatccagctaatttttgtatttttagtagggacggggtttcaccatgttggccaggctagtctcgaactcttggcctcaagtgatccgccttccttggcctctcaaaatgctgggattatagatgtgagccactgcacccagccaggttcccataattttgacatggtttgatattcagtaatatgtaacacttaaaaagtatgactcaaattattcagatttgagcaatgttgtggttaagagagcatgagcatgtcagccaaaattagctatttacctgttatacagaataaatatattagcttcagaaaaggttcttaattcctcttctcctgctcatcaactttccttagcaggacgtcacttccatgcctttttcatcacaaacttatccctaaatctctaccttcagctctggtggcagctcttgtagttatcccactctcttctttcctctccatttcacattacaaagcccatgataattacaaaaattagttataaattttaatttgaggtagttgactcacaagacgttgcacagtcataaagttcccatgtatgcttccccagcttccccagtgatacatacacataaccatatttacataaccacagtacactgtcaaaaccaggaaatggtcattgatacagtcctcttaactcaggtacagaccttattcagatttcaccagcttttacatttgacatgtagttcaagagccccagctttgcaagacaggactaccttggaaggcagggaagtggaagagaccaagaatgccaagctagaatctttaacaagagatttaggagggaagaagagagagattcaatatgtacagatgtaactgttgatccatcacaattaacctaatttgtttctcttatttttcaccaagggaaagcatggtgcctctggaccacctggcaacaaaggggcgaagggtgacatggttgtatcaagagttaaaggtgagcataatcaatcacttaactccctgccattttatgaatgatgtatggaccctcctcttgcagtaatttcccctgtgaccatagatcaattctatacaatttaggatggttgagattacttaaaaaaatacttcctgcccttcataaggttgtatgaatgttgagccaaatcccctgtctcttatttgaaaacataaatattcctttagccacacattcacatcttcattatagtgaacttgagtttggctcaagccctcctttggcttggctggtgtttattcaccacattacagtattctatattagtcaataatattttcattgtaaatgaaagaagcccagcttgaaatcgtttttttaagtaatttattgacctaaacaaaatgtgaaatattaaaaggtagtgttttttattagtaagagttccccagggacagaactaataggatatatgtgtatatgaaaaggagtttattaaggagaattgactcatatgatctcaaggtgaaaccccactacaggctgtctgcaagctgaggagcaaggaagccagtagtggctcagccccaaaagtagtggctttcctacttttgagtccaaaagcctcaaaagtagggaagccaacagtgtggccctcagtctgtggctgaaggcacaagagccctggcaaaccactgatgtaagtttaagagtccaaaggccgaagaacctggagactgatgtccaagggcaggaagcattcagcacaggagaaagatgaaagccagaagactcagcaagccagcttatcccaccttcttccacctgctttgttccagctgtgctggcagctaattggatggtgcccacccacattgggagtaggtcttcctgtcgcagtccactgactcaaatgttaatctcctctggcaacaccctcacagacacacccaacaacaaccctttaccagctatgtaggcatccttcattccaatcaagttgacacttaatattaaccatcacaggttggcattgggacaaccagatcccggcctccagtggcatcaagaggctctccctgcatctttcatctcacattgtaccatctatattttctcccatcagactgattttcatacccccaggcagctccaagttcttacatccagagatgaagagagccctgctttgtcagctccaaatagaaaaataatttcagaaaggactgattagcttagggcaagtacccaaccgcagaccattccccctttcccatggccagggatagagtgctgtgcttggcatcacaggtaggggaagattctgtgattggcaccttcacacaccagctccttgctggaatgggaaaaggagcttttcccaagtaaagagattcaatggttctagcaattgtcattctcccctctggctttggcatgttttatgtgacttgagcaattgagatacacaggaaactaccaacccagaatcaaggtcattttctttattttttgtcctctctatcctactttaccctctgctgataagagcttgaatatcttttgacctctatttccagggcacaaaggagaaagaggtcctgatgggcccccaggatttccagggcagccaggatcacatggtcgggatggacatgctggagaaaaaggggatccaggacctccagtatgtagaattcttctcttgctatagaatttcactttcttatatggtcatacaaacaactatttcccctttctctatttgccaagctgaaattcagtaaaatatcaacatactataaatcagagtcacttttggcaccctgacatggaaagatgattgttttaagaggtatagcatcattggacatggtctaaaatcctcttggcagttcagtcctagcaggactttcggtccttggtctttatatcattctcgtggtgttcattttcttctgagaaacttgtatcctagaagggccccactgattttaggtgtattcagttgactctgtggggtggaggatggagctcgggtcccgatgtttagcatcaattctgtttcctggagaagatgcacatgggggaagtagtgagcatgaaagggtgaactcgtgcaaacccacagagtcaaggcgttggctgatggaaaatctcactgataaaggatgttgctgcatttttcagacatgcgttgggtggataccatgtgtaggtaatggtaattaaggtcataaaagaagaggatgagatgatccgatgcttaggaacttaaaatatcttaaatatgtgcagtatttctgaatgcttacaatatcacagaaaccagactagatggtttcctcaaaacagtcttctgaaaagcaatacctttccaattttacagtaagaaaatggaggcttagcatctgatattcaaggctacccatctgtcaaataggcaaaataggagtgaaaacttgtctgtcttatttcaaagtgcatgctatttctaccaacctgtgctgcctgccatatataatgggaagccactgagagtgttgcaacagggaaagaccatgtcctgattctacaggaaacccttcagacagaatccaagtgaacaagagagagaagcctggaaattggcttagatggtgtttatagctttctgacctttctcctgatcacaagtatgtgaatgatctctgctttaggcttggtaatctctgcttaattcattcttcctctcaaggaactacttagaaatcactgtcactgagtggatattgtcataatgtactcatctaattgtgaaaaagcagcgtctatatagatcaaactaggagacgaatttcaacgttcgctgaggtcttcctagattcgttgaaacaatccagatccataagactgttgtagaccacatttgagaccaggccatgtagaaggataaaaggtcactcaaaatgccagcaggacagtgtcagatattccttgcatttgagagtgcttgcagctgttcagtcaggtggggtgcaagaagggatgagacccacatatggtgggcatggaggcagccctgacttgaaagcctcattccccatgggagctgttatccactgcacagcttttgagaaccccaccagggattgccagtgagggaatccttgatgcaggctccccacagttcttccagaccagatgcaaattttgcaactggggattgattttactataagcagtactgcctaggaaggtagttgacaatctaatttttatcagaggaacagaaccagacagttaaccaaaagtcaaattgtcatgcaagaggagaaaggacttgctaggcttttacccacaggggtggaggatgatggagtctagctatgtatcttgtcaagagaatacataagaatgtatttgatttgtaatcccaccacctcccttgatctacttatttctatattctatgacatatgatattagagaatggtttgacataaatctcttattctgtatttaaggcatatcacacacattgtttccagtatttgaggcttaacacacatgcttatattatatgtatgtatataaattgtaaaatgtgtatattggccaggcgcggtggctgacgcctgtaatccctgcactttgggaggctgaggcaggtggaggtcaggggtttgagaccagcctggccaacatggcgaaactcagtctctactaaaaatacaaaaattagccaggtgagctggtgggtgcctgtaatcccagctactcaggaggctgaggcaggagaatcgcttgaacctgggaggtggaggctgcagtgaaccgagatagcaccactgcacaccagcctgggtgacagagagagactccatttctatatatatatatttaaaatattaaaaagtatctaagttatttattttaaacttacatttgcttaagagtaactgtctcctgaaattatggacttttgcgtgtgtttctgtaacctacaatgactgctttgagttcatggacattcagtggttggtaattgactcatgacataacattcccagggggatcatgaagatgcgaccccaggtggtaaaggatttcctggacctctgggccccccaggcaaagcaggacctgtggggcccccaggactgggatttcctggtccaccaggagagcgaggccacccaggagttccaggccacccaggtgtgaggggccctgatggcttgaagggtcagaaaggtaattttaaaaaaattttatttatttcaatagctttggggtacaagtgtttatttttcttatgtggaagaattatatagtggtgaattctgagattttagtgtacctgtcacccgagtagtgtacattttacctaacgtgtagatttttgtatccctagacccctttcctccctcctccttctttttttttttctcagtattcaagtgtttttctttttctttttctttaattttactttaagttctgggatacatatgtagaatgagcaggtttgttacataggtatacatgtgccatggtggtttgctgcatctatcaacccatcatctaggttttaagccccacatgcattaaggtatttgtcctaatgctctccttccccttacccctgaccccctgacaggtctcgatattatgtgatgttcccctccctgtgtccatgtgttctcattgttcaactcccacttatgagcgagaacatgcggtgtttggttttctgttcctgtgttagtgtgctgagattgatagcttccagcttcatccacatccctacaaaagaaaatgttctcattctttttttatggctgcatagtataccatggtgtatatatgccacattttctttgtccagtctatcattgatgggcatttggtttggttccaagtctttgctatggtaaatagtactgcaataaacatatgtttacatgtgtctttatagtagaatgatttataatcctttgggtatatacctagtaatgggattgctgggtcaaatggtatttttgattctagatccttgaggaatcaccacactgtcttccatcatggttgaactaatttacactcccaccaacagtgtaaaagtgttcctatttctccatatcctctccagcatctgttgtttcctgactttttaataatctctactctaactgccgtgagatggtatctcattgtggttttgatttgcatttctctaatgaccactgatgaaaagctttttttcatgtttgttggccacataaatatcttcttttgagaagaaggatatctgttcatatccttcacccactttttgaaggggttggttttttcttgtaaatttgtttaagttccttgtatattctggatattagacttttgtcagatgggtagattgcataaattttctcccattctgtaggttgcttgttcactctgatgacagtttcttttgctgcacagaagctctttagtttgattagatcccatttgtcaatttggcttcttttgcaattgcttttggtattttaatcatgaagtctttgcccatgcctatgtcctgaatgatattgcctaggttttcttctagggtttttatggttttgggttttacatttaagtctttaatccatcttgggttaatttttgtataagatgtaaggaaggggtccagtttctgctttctgcatatggctagccagttttcccaacaccattaattaaatagggactcctttccccatagcttgtttttatcaggtttgtcaaaaagcagatggttgtagatgtgtagtgttatttctgaggtctctgttctgttccattggcctgtatatctgctttggtaccagtaccatgctgttttggttactgtagacttgtagtatagtttgaagtcaggtagcttgatccctccagctttgttctttttgcttaggatggtcttggctatatgggctcttttttggttccatgtgaaatttaaagtaatttttttttctaattctgtgaagaaagtcaatgatagcttgatgggaatagtactgaagctataaattactttgggcagtatggccattttcatgatattgattcttcctatccaagagtgtataatgtttttccatttgtttgtgtcctctcttatttctttgagcagtagtttgtagttctccttgaagaggtccttcatattccttgtaagttgtattcctaggtatttttttctctttgtagcaattgtgaatgggagttcactcatgatttggctctctgcttgcctattgttgatgtataggaatggttgtgaattttgcacattgattttgtatcctgagactttgctgaagttgcttagcttaaggagtttttgggctgagacgatgggattttctaaatatacaatcatgtcatctgcaaacagagacaatttgacttcctctcttcctgtttgaatgctctttatttctttctgttgcctgattgccttggccagaacttccaatactatgttgaataggagtggtgagagagggcatccttgtcttgtgctggttttcaaagggaatgcttccagcttttgcaaattcagtatgatattgcctatgggtttgtcataaatagctcttgttattttgagatatgttccatcaataactagtttattgagagttttttcatgaagagatattgaattttattgaaggccttttctgtctctgttaaaataatcatgtggtttttgtcagtggttctgtttatgtgatgaattatgtttattgatttgcatatgttgaaccagccttgcatcccagacttgatcgtggtggatatgctttttgatgtgctgctggattccgtttgccagtattttattgagggtttttgcattaaggttcatcagggatattagcttgaaaatttttgttgttgtgtctctgccaggttttggtatcaggatgatgctggcctcataaaatgagtaagggaggagttcttatttttctattgtttggaatagtttcagaagaaatggtaccagctcctctttgtagctctggtaaacttcggctgtgaatccatctggtcgtgggctttttttggttggtaggctcactacctcattggttactgcctcaatttcagaacttgttattggtctatttgaataaccaaataaaccagatttgaattcttcctggtttagtcttggggcatcctcccttttctgaatctctgaagtccattatatcactcttatgcctttgcatactcatcacttacctcccactcgtaagtgagaacatacagtttttggttttccactcctgtgttacttcatttataattatggcctccagctccatctaagttgctgcaaaagccattgttttgttccttttaatggctgagtagtattccatgttttttgtataccacattttctttatccactcattagtcaacaggcacttagattggtgccacatctttgcaattgtgaattgtgctgctataaacatacatgtgcaagtgtctttttcatataatgacttctcttcctttgggtagatacccagtagtgggattgctgggtcgcatggtggatctacttttatctctttagggaatctccacacttgttttctacagaggttgtactaatttacatttccatcagcattgtataagtgttcccttttctccacatccatgccaatatctattgttttttgtctttaaataatggccattttttgcaggagtaaggcaatatctcattgcagttttaattggcatttccctaatgattagtgatgttgagtattttttcacatgcttgttgtccatttgtttatcttactttgagaaatgtctattcatgtccttttcccactttttaatgggattatttgtttttttcttggtgttttgtttgagttctttgtagattccgcatactggccctttgtcggatgcatagtttgcaaatagcttctcccattctgtgggtttctgtttactctacttatttattttttttgttgtgcagaggccttttagtttaactgggtcccatttatgtatttagtttttgttgcatttgcttttggggtcttattcatgaattctttgctgaggccaatatctatatgagtttttccaatgttgtcttatagaattttgatagtttcaggtcttatatttaagtctttgaaccatcttcagttgatttttgtataaggtgagagataggaatccggttttattcttctaatacatgtagcttggcagttttcccagcatcatttattaaatagggtgtccaccccccaattttttgtttttgtatgctttgttaaagatcagttagctgtagatatttggctttgtttctggattctctgtgctgttccattggtgtatgtgcctacttttacaacagtaccatgctgttttggtaactaaagccttgtagtataatttgaagttcagtaatgtgatgtctccagatttgttcttttttgcttaggattgctttgtctattcaggctcttttttggttcaatacaaaattcaggattgttttttctaattctatgaaaaatgatgtgcatattttgatgggaattccactgaatctgtagattacttttgaagtgtggtcattttcacattatcaattatcccaatccataaacactggatgcatttccatttgtgtcatctatgatttctttcaacagtgttttgtagttctcctttttgagaactttcacctccttggttaagtatatttttagttattttattttagttttcacagctgttgtaaaaggaattgagttattaatttgattctcaacttgattgttgttggtgtatagcaatgctactgatttatgtacaatgattttgtaacctgagactttactgaatttgtttatcatatctaagagtatttttgaagaatccttaggattttgtaagtgtacaatcatattatcggcaaacagtgatagtttgacttcctcttttctaattttgatgctgtttatttatttctcttacctaattgctctggctagtacttccagaactatgttgaataggagtggtgaaagtgggcatccttctcttgttcctgttctcagggggaatgctttcaacttttttccattccatatgatgttatctgtgggtttgtcatacatagttattattatttgaggtaggtcccatctatgccttgtttgttgagattttttgtcataaaggaatgctggattttgtcgaatgctttttctgcatctattgatcatgtggtttttgtttttaattatgtttatgtgatggatcacatttattgacttgcatatattaaaccatccctacatccctgggatgaaaaccacttgatcatgatgaattctctttttgatatgctgttcaattcatttagtattttgttgaggatttttgcatctatgttcatcaaggaaattggtctgtagtttgtgtgtgtgtgtgtgtatcttttcctgtgttggtatcaggatgatactagcttaatagaatgatttagggaggatgccttctttatcaatcttttggaacagtttcagtaggatttgtaccaattcttttctctcagtgtctaagtagaatttagctgtgaatccatctgattctgggtttgttttcttgggaatttaaaaattactgattcaatctcactgcttgttattggtttgtttgaggtttctatttcttcctgatataatctagtagggttttatgtttccaggaatttgtccatttcctctagatttcctagtttgtgtacataaaggtatccatagtagtcttgaatggtcttttgtatttctgtggtgttggttgtaatgaccccagtttcggttctaattgagcttatttggatcttctctcttcttttcttgtttaatctagctaatggtctattgattttgtttattttttcaaggaaacggctttttaactagctttttattcattaatttttcatatttttttggtttgcatttcatttggttcagtctgatctttgttatttcttcttctagctctaagtttagtatgcttttgtttttctagttccttgaggtgtgactttaggttgtcaatgtgtgctttttcagactttttgatgtaggcagttagcactataagctttcctcttagcactgcttttgctgtattccagatgttttgaaaacttgtgtcaatattatcattcaattcaaataatttttaaatgtccatcctgatttcattgttaacccagatatcattcaggagcagattatttaatttccatgtatttgtataattttgagggttccttttggagttgatttctaattttattccactgtggtctgagaagatacttgatacaatttcagttttaaaaaatttattgagacttattttgtggcctgtcatatggtctatcttggagaatgttccatgcttctgagaagaatgtatatcctgcagatcttgggtagaatgttctgtaaatgtctgttaagttaatttgctctagtgtgtcacttacatccattgtttctctgttgacgttctgtcatgaagatctgtctagtgctgtcagtggtgtattgaagtctcccactattattgttttgctgtctatctcatttcttaggtctagtagtaattgttttttgaatctaaaagctccagtgtttggtgcatataaatttatgattgtagtatcttcttgttgatcgttttatcattacatagtgaccatctttgtctttttgttattactattgttattttgaagtttgttttttctgatacaagaatagctatccctgctgcctttggtttctatctgcatggaatacattttcctacccctttatcttgagtttatatgagtatttctgtgttagcctcttaaagacagcagatatttggattgtgttgtttttgtccattttgccatcccgtatctttgaagtggagcatttacactcaacatgaatattgagatgtgaggtattgttctcttcatcatgttaattgttacccagatagttgtcttttcattgtgttattgtattataggccgtgtgagttctaaagtttcaagaggttctattttggtgcatatcaggcttttgtttcaaggtttagaactccttttagcatttatttatttatttatttatttattattatactttaagttttagggtacatgtgcacaatgtgcaggttagttacatatgtatacatgtgacatgctgctgtgctgcacccactaactcgtcatctagcattaggtataactcctaatgctatcctcccccctcccccctccccccaccccacaacagtccccagagtgtgatgttccccttcctgtgtctatgtgttctcattgttcaattcccacctatgagtgagaatatgtggtgtttggttttttgttcttgcgatagtttactgagaatgatgatttccagtttcatccatgtccctacaaaggacatgcactcattgttttttatggctgcatagtattccatggtgtatatgtgccacattttcttaatccagtctatcattgttggacatttgggttggttccaagtctttgctattgtgaataatgccgcaataaacatacgtgtgcatgtgtctttaaagcagcatgatttataatcctttgggtatatacccagtaatgggatggctggttcaaatggtatttctagttctagatccctgaggaatcgccacactgacttccacaatggttgaactagtttacagtcccaccaacagtgtaaaagtgttcctatttctccacatcctctccagcacttgttgtttcctgactttttaatgattgccattctaactggtgtgagatggtatctcattgtggttttgatttgcatttctctgatggccagtgatggtgagcattttttcattgttttttggctgcataaatgtcttcttttgagaagtgtctgttcatgtccttcgcccactttttgatggggttgtttgtttttttcttgtaaatttgtttgagttcattgtagattctggatattagccctttgtcagatgagtaggttgcgaaaattttctcccattttgtaggttgcctgttcactctgatggtagtttctttttctgtgcagaagctctttagtttaattagatcccatttgtcaattttgtcttttgttgccattgcttttggtgttttagacatgaagtccttgcccatgcctatgtcctgaatggtaatgcctaggttttcttctagggtttttatggttttaggtctaatgtttaagtctttaatccgtcttgaattgatttttgtataaggtgtaaggaagggatctggtttcagctttctacgtatggctagccagttttcccagcaccatttattaaatagggaatcctttccctattgcttgtttttctcaggtttgtcaaagaccagatagttgtagatatgcggcgttatttctgagggctctgttctgttccattgatctatatctctgttttggtaccagtaccatgctgttttggttactgtagccttgtagtatagtttgaagtcaggtagtgtgatgcctccggctttgttcttttggcttaggattgacttggcgatgccggctcttttttggttccatatgaactttaaagtagtttttttccaattctgtgaagaaagtcattggtagcttgatggggatggcattgaatctgtaaattgccttgggcagtatggccattttcacgatattgattcttcctacccatgagcatggaatattcttccatttgtttgtatcctcttttatttccttgagcagtggtttgtagttctccttgaagaggtccttcacatcccttgtaagttggattcctaggtattttattctctttgaagcaattgtgaatgggagttcactcatgatttggctctctgtttgtctgttgttggtgtataagaatgcttgtgatttttgtacattgattttgtatcctgagactttgctgaagttacttatcagcttaaggagattttgggctgagacaatggggttttctagatatacaatcatgtcgtctgcaaacagggacaatttgacttcctcttttcccaattgaataccctttatttccttctcctgcctaattgccctggccagaacttccaacactatgttgaataggagtggtgagagagggcatccctgtcttgtgccagttttcaaagggaatgcttccagtttttgcccattcagtatgatattggctgtgggtttgtcatagatagctcttattattttgaaatatgtcccatcaatacctaatttattgagagtttttagcatgaaagttgttgaattttgtcaaaggccttttctgcatctattgagataatcatgtggtttttgtctttggttctgtttatatgctggattacatttattgattcgcgtatattgaaccagccttgcatcccaggggtgaagcccacttgatcatggtggataagctttttgatgtgctgctggattcggtttgccagtattttttgaggatttttgcatcaatgttcatcaaggatattggtctaaaattctcttttttggttgtgtctctgcctggctttggtatcaggatgatgctgacctcataaaatgagttagggaggattccctctttttctattgattggaatagtttcagaaggaatggtaccagttcctccttgtacctctggtagaattcagctgtgaatccatctggtcctggaccctttttagttggtaagctattgattattgccacaatttcagatcctgttattggtctattcagagattcaacttcttcctggtttagtcttgggagagtgtatgtgtcgaggaatttatccatttcttctagattttctagtttatttgcgtagaggtgtttgtagtattctctgatggtagtttgtatttctgtgggatcggtggtgatatcccctttatcattttttattgcatctatttgattcttctctctttttttctttattagtcttgctagcggtctatcaattttgttgatcctttcaaaaaaccagctcctggattcattaattttttgaagggttttttgtgtctctatttctttcagtcctgctctgattttagttatttcttgccttctgctagcttttgaatgtgtttgctcttgcttttctagttcttttaattgtgatgttagggtgtcaattttagatctttcctgctttctcttgagggcatttagtgctataaatttccctctacacactgctttgagtgcatcccagagattctggtatgttgtgtctttgttctcgttggtttcaaagaacatctttatctctgccttcatttcgttatgtacccagtagtcattcaggagcaggttgttcagtttccatgtagttgagtggttttgagtgagattcttaatcctgagttctagtttgattgcattgtggtctgagagatagtttgttataatttctgttcttttacatttgctgaggaatgctttacttccaagtatgtggtcaattttggaataggtgtggtgtggtgcagaaaaaaatgtatattctgttgatttggggtggagagttctgtagatgtctattaggtctgcttggtgcagagctgagttcaattcctgtgtatccttgttgactttctgtctcgttgatctgtctaatgttgacagtggagtgttaaagtctcccattattaatgtgtgggagtctaagtctctttgtaggtcactcaggacttgctttatgaatctgggtgctcctgtattgggtgcatatatatttaggatagttagctcttcttgttgaattgagccctttcccattatgtaatggccttctttgtctcttttgatctttgttggtttaaagtctgttttatcagagactaggattgcaatccctgcctttttttgttttccatttgcttggtagatcttcctccatccttttattttgagcctatgtgtgtctctgcacgtgagatgggtttgctgaatacagcacactgatgggtcttgactctttatccaatttgccagtctgtgtcttttaattggagcatttagtccatttacatttaaagttaatattgttatgtttgaatttgatcctgtcatgatgatgttagctggttattttgctcattagttgatgcagtttcttcctagtctcgatggtctttacattttggcatgattttgcagcagctggtaccggttgttcctttccatgtttagcgcttccttcaggagctcttttagggcaggcctggtggtgacaaaatctctcagcatttgcttgtctgtaaagtattttatttctccttcacttatgaagcttagtttggctggatatgaaattctgggttgaaaattcttttctttgagaatgttgaatattggcccccactctcttctggcttgtagagtttctgccgaaagatccactgttagtctgatgggcttccctttgagggtaacccgacctttctctctggttgcccttaacattttttccttcatttcaactttggtgaatctgacaattatgtgtcttggagttgctcttctcgaggagtatctttgtggcgttctctgtatttcctgaatctgaatgttggcctgccttgctagattggggaagttctcctggataatatcctgcagagtgttttccaacttggttccattctccctgtcactttcaggtacaccaatcagatgtagatttggtcttttcacatagtcccatatttcttggaggctttgctcatttctttttattcttttttctctaaacttcccttctcgcttcatttcatcttccatcgctgataccctttgttccagttgatcgcatcggctcctgaggcttctgcattcttcacgtagttctcgaggcttggttttcagctccatcagctcctttaagcacttctctatattggttattatagttatacattcttctaaattcttttcaaagttttcaacttctttgcctttggtttgaatgttcccccgtagctcggagtaatttgatcgtctgaagccttcttctctcagctcgtcaaagtgattctccgtccagctttgttccattgctggcgaggaacttcgttcctttggaagaggagaggtgctctggtttttagagtttccagtttttctgctctgttttttccccatctttgtggttttatctacttttggtctttgatgatggtgatgtagagatgggtttttggtgtagatgtcctttctgtttgttagttttccttctaacagtaccctcagctgcaggtctgttggagtactgggccctgtgaggtgtcagtctgcccctgctggggggtgcctcccagttaggctgctcgggggtcaggggtcagggacccacttgaggaggcagtctgcctgttctcagatctccagctgtgtgctgggagaaccactgctctcttcaaagctgtcagacagggacatttaagtctgcagaggttactgctgtctttttgtttgtctgtgccctgcccccagaggtggagcctacagaggcaggcaggcctccttgagctgtggtgggctccacccagtttgagcttctgggctgctttgtttacctaatcaagcctgggcaatggcgggcgcccctcccccagcctcgctgccgccttgcagtttgatctcagactgctgtgctagcaatcagcctggcgtaggaccctccgagccaggtgcgggatgtgatctcctggtgcgccgttttttaagcccgtcggaaaagcgcagtattcgggtgggagtggcccgattttccaggtgccctctgtcacccctttctttgactaggaaagggaactccctgaccccttgcacttcccaagtgaggcaatgcctcgccctgcttcggctcgtgcacggtgcgcgcacccactgacctgcacccactgtctggcactccctagtgagatgaacccggtacctcagatggaaatgcagaaatcacccgtcttctgcgtcgcgcgcgctgggagctgtagactggagctgttcctattcggccatcttcccttttagcatttcttgtagtgcatgttttgtagtgaaaaatttcctcagcatttgcttgtctgaaaatgactttatttctccttcatttatgaaatttagttttgtggaatacgaaattcttggccgacagttgttctgtttaaggaggttgaagataggatgccaatcccttttggcttgtaaggtttctgctgagaagtctgctataagtctgataggttttcatttataagttacctgatgcatttgtctcactgctcttagaattcttgccttcattttgaatttagatagtctgataactatatggcttggtgaaggtctttttgcaatgaatttcccaggagttctttaagcttcttggctttggatatctagatctgtagccaggccatggaagttttcctcaataactgcctcaaattagttcttttttcttttccctcaggaatgccaattagtcttaggtttggctgttttactaataccatatgtcttagagtctttgttcatttttttcttatttttgtctgattgggttaattcaaaagccttgtctttgagctctgaaattctttttgttctagtctattgttaaaactttccactgcattttgtaattccctcagtatgtttttcatttgtcaaagttcggattagtttttcttgatgatatctgtctagagaatttttttgttcatatcctgaattgctttttaaatttatttatgatgttttcacccagaaaggtaattttgaatatttctgtggcagaatgtcacataaaatcatggaagctaaaatgagtctcttctgggcaaaattattatagctatggcataatagctacataaaatttgatccaggcactgttcaaaccttgtaccttgttaaacaaataaaagcattacaacacaatatttaaagtaaatccttaagatgctaaaatatctttgttgttttatttgacataccaaaattgcttttccttcatttctcagtatgaactcatacaatctgactatattaaaattacatatatgtatatatattatatacacatactcaaagtatagaattatttttatagtcttttgagataatactatatattttaatttttaaaaactagtatctcatttaaactatcattgtccatgaaaaaccatttgttggcattctagtgagaaaaaagaaggtattttaaatatattttacagttatgtgaatttcaaacaataaaatgactttcaggattatagctgaaaactcttaagaaggtggcaaaaaaggtttaagtttttttcttttgtaacatgtattatatatatatcttgaactacattgctagttgtgaagttttagaacaaagtaatatcctttgttcttgttttgataacagaaaggcaagcaagtatcttggtatttgataaggtataaattcatggtctagaacccaacaaaatctgatgtcatttttattcatctgatatatcttagatctgagagcatataaagaaatgcactatgaggtattattcctaatataaaagagaaaaattccattttaggatacaggaactgagagggaactgagaggctcaaacttgggtgttttattggtgatatctatctctctagaaaatttttcattcagaccctcaactgcttattaactttctttaaacatttctttaacatgggggatgatgctactagattgtgaagtcattagaaaaatgagacaatatacttgaagcaccaaccctcaataagtggtagctattcacatttagcccagcctcttcatttgcacaatttctccatgttcatagtaagagtcagattttctgaactcagcattggacacctgctgctattttatgatttatcgagacttctcattctattgtgttagatatgcatgtaatagatctccattacattattattattatctactacccatgtagttcatctccattacatttttatcatctacattgcttttatagattattgaaacttatactttttataatcaatatatttcttttcttacgtttataactcttctgacagttgaaattcagatttcaggaaaaatctaaaaattctgtatgaaagcagcttaagtgatctaatgatacttgggagtcttctttttctttgacttctgcatatactatacagaaaaatatcttgaggaagttgtcattgagacagactcacattgcactgggctatcagttatgtgaatgccgcttttcttttctcattgcaggtgacacaatttcttgcaacgtaacctaccctgggaggcatggccctccaggttttgatggacctccaggtattatcaatgagaagttactgtcttatatacttcccagagtaaaaaaaaaaaaaccagccagacagataaaccaagagtgaatcctcagactagttaggacatttctgaagttttgagggaccatggataggggaaaacagcatttgtagtaatttgtagttgggcctctagtctgctggtttgagaacactccagatgggcttttcaaatctttgtacaataaaatttaccttgatttgctcacatatcagttaaaatgtctgtcccttgaaagttttttttttttttttgagacggagtctcactttgtctcccgggctggagtgtagtggtgtgatctcagctcactgcaacctctgcttcccaggttcaatgattcttccgcctcagtcttccaagtagctgggactacaggtacccgccaccgtgcccggctaatttttgtgtttttagtagagacagggtttcaccatattggttaggctggtcttgaactcctgaccttgtgatccgcccacctcggcctcccaaagtgctgggattacaggtgtgagccaccgcacccagcctgaaagttttaaaactgtatcttctttcctttcctgtgcctcaagagtgaatcatgatcacttgtttattgattgtaagttttactttccaagagaaccaacatttgatcagaaacatttgaaaaaaatgcccaaatatctctgtccttgtttgcacattcatgcaacagcttcatttgaatcaatcacttatttttagatgaattaaatccaaaatctatctaagatattttgcctaactcttctttgtttctttagagttccctacccgttcattactagtatgaataatgactgactgttactctctctaccatcaaattttatgacaataatgtgtaaataatctcaaaatctcagtgggctacagcaaacacttattttctatcttatgggtctgcaggttggttgggtttagctgatctaagatggtctctgttggcttagagtgtagctccaagttaggtttggggttgcaacatgcatctcattgcaaggccaggcttttctcatgtgattgcagaaatgcaagagggccagctcagctcacaggctccctccacacctctgattggatcatgggcattcatttcctattgcccaaaacaagtcacatgaccaagccctgggtaaaagggcagggaattacactccgcccaccacaaggcaatggcaagagtgcggaaatataattccgtatcagcagagtggagaattgcaggttgacggattgaacgttcatttttacttttactggtcatgggtggataaaaaaaagtttgatttctttcagcagctgtaacttcgagagaagtgaatactcacattttaatttgacagttgtgcctccattgaagtttatgatttataagttattttagctgagataactccttgtagaaaatcacagaaggtttaaaatagattctctaggccgggtgcggtggctcatgcctgtaatctcagcactttgggaggccgaggtgggtggatcacgaggtcaggagatgagaccatcctggctaacacggtgaaaccctgtctctactaaaaacataaaaaattagccaggcgtggtggcgggcgcctgcaatcccagccacttgggaggctgaggcaggagaatggcgtgaacccaggaggcagagcttgcagtgagccgagactgcgtcactgcactccagccttggtgacaaagcaagactctgtctcaaaaaaaaaaaaaaaaaaaattctctattactttttgcaagtgctttttgcctatacttcatttaagggcaaattcagtaagatgcagggaaatagattttggtctttaatctgatcctttcttgtcaaggtagacactggccaccacctctttacccctacaagggcagacaatggttgcatagtcgtgtttcagacctagcatgggaagataccaaaaaaagtcacctgaatggtggtacaagttccaaaggctttcaggaagaatccttcacaggatggcttctgagaaagtgccttaacaaaatcactcctagaaaacatttatttggagcatatgacttacaatatatttttgtaaatcgggataggcaacatccttacttccataaagtagaaatattctaaaaggacttaacatagacttaaagaaaatcatctcattttgttcacattagattttgttttattgagtctgtgttttgtttttattattgtttaggtccgaagggatttccaggtccccaaggtgcccctgggctgagtggttcagatgggcataaaggcagacctggcacaccaggaacagcggaaataccaggtccacctggtcagtgaggttttttttttttttttttttttttctgctttgggaatatctatcaggaactttttaacatttctaccgatggataatttcattgaggaaatggtccagggatccctagataatagggaaatggtgtttcttgatagacccttagctatattgtgataactttcagattataattttataagttgccaaggctccttacaccttgaagcataagttgtgggctattatttgtctattatgttgttgaaactactcagtccagccagaatgtttgccagagaaggaaagcaattagggaaacatcattggcttataggaaacacaaagttgcagtttctctctctacaaaaggtggcaaaacaacattactgttaaactgctcttaattttagtaagtacccctgtgtttttaagaaaagtatttttatcaaagtaagtcttatatgtattggttctatacttgcacatgttatcattaaaaatttttttttgttgttaaataggttttcgtggtgacatgggagatccgggttttggaggtgaaaaggggtcctcccctgttgggcccccaggccctcccggctcaccaggagtgaatggtcagaaaggaatcccgggagaccctgcatttggtcacctgggacccccgggaaagaggggtctttcaggagtgccagggataaaaggacccagaggtgatccgggatgtccaggggctgaaggtatgagggctttgctgtccttttggtgcatagagctggctcagttttggaacaggtcactgaagaacgtttagattattttgctttaggcatgtagaatataaacagtttacccaagtgttttccctcatttggggtgctggttacatttcaaataacctgaatctctagccttgcctttgcactttattgattgttttcaaatgcagggcagctcactgtggttcattcaactcaatttgattccgcagctagtatgttggtgctgcaaaggccaagagcagggactgtgtaacctgtctggggctgttgccaggtggaaggtaggcaggcctgattgtgagaggaagagtggcttagaggctggagctgtgagctggcatctgggaacactctatgggagagccgggtatgagctgagcctagaggacaagctgtcttcgcacaagagacagggtagagggaccttcattccatttggggtggcaggagggcatcaaacgcaagagaggaagatggcctggacactgattcatatccttttctgaaatcagtaaggatccttcaggatccccagtggagtttttcaggttttaatgtacttaaaaataaccaagtgggggtggggcagctcattaaaattattgtcttcaggaccccagtctgaggaattctgattcattatttctggggtggggccccacattctgaacttcagtgggcctcttgggtgatggtgatcaagatgtgaaccacagatcagatgtttacaaagaacattctggttcttttctaaaagtcggtgggccagtgtttattaggcatccactagagtacattagcacaggacacgtggaggagaggaggagaattagcaccctcaaggagcttgcatggaagtttgtaaataaaaagattcatattgaaagaaacaattaattggaaagtaacaggtgaaacataatgtaagtcaataaaaataatgacccagtaatccgactatctcacttgtgaaaatatatctaagggaagtgttcaatggaagaaggttatagatatgaaaatgcccttgtagtattatccacagcagaggaataattggaaagaacaaagacagacacacacacacacatacacacacactctatctctcaaaggaataccatccagccattagcaatttaaatcatatttgtaaagactgcaacaaactggaaaacatttgcagattaatatgcaatctgaagcgctccaacaactgaatttgcactgattactatttttaaatgtaaacatatgaaccaaaatgtaaagaaaacataggaaaacaaagtagatttttgggttagggtgtggaattatgggggatgttctttcctgaagattatgaccctgtctttctagtgagtagaaatttgagaatacaagtgatgaaatctctcataaaatgcaaattcatacagtgcaaactgggtttgtaaatattgtagagatttgatgtaaagcctgatgcaaagttagaggttaattaaaattaggaagaaccaagtggtttcttatttgcataggcaactgcagtccacataaccttatcaagtaactcacttagcaatgcgttgtttctctgttcataaggaactcattacatctatgataagaaaatccactcaaagacttaacccatttgaacactgattcaggatgaaaatgttcacctccagtattgatatgcgtgaacaattcatcatgggccatctgtatagttttttgtcatgaatgtcatggatgtattgtatcatttcagggccagctggcattcctggattcctaggtctcaaaggtcccaaaggcagagagggacatgctgggtttccaggtgtcccaggtccacctggccattcctgtgaaagaggtgctccagggataccagggcaaccgggactccctgggtatccaggtagcccaggtaagtgtcaagaactgtgaagggtctggggcttaccctacttacaattaaataagctccccttttactcttttatggatgctgccagaagcaagagtcctgagtcagagacaaaggacttcgttactcatgagtttcatgttggtttgcatcacttcccccatgtcacccaagtcttatggggcaatgtagtgggctagttggccacacacacagtgggttgcattacatgagaggagccctgagccaaggaaccactgctttatagcaacctgtgagaaagcctgcttttcctattgaggaaagtgctatatcatttatcaagggtgcttgctgcaaacacaagcttgagaagtttcccaggtaaagagcattaggatcttgcattcttggcatacccaggaagacgtaggaacacaagagacccctggagtgtctcctaatacaaggtgcagggaggctgccttagtccattcgcactgctctaccaaataccttaaactaggcaatttataaacaacagaaatttatttcttatggctcaggaggctgggaagtccaagatcaagctgccagcagatttggtgtgccttccttgtgtcctcacaggcagatggggcaaacagctcttttgcacctctttaataaggtcaccaatcttattcatgagggctctgcccttatgacttaatcacctccccaagtgttcaccttttaatactatcacattggtgattaactttcaacatatgaattttggagggacacattcagaacatagcaggggctattttcaatatgatcttcatttcactattcacattgtttactctgtcatttaaatcccattgcttttatccaaatgcagtaatatacgcacttgaaaaattaaaaccagattgaggcaaaactttccgctacagccatatttctagcaccaataatgttagacaccggctctgacttcttctcggctgtagagcttcaggaaaaacctggaaagttttcttctattagtttccctccaccaagaggaaatacaaatacatgtttgttttttctttttgttttctgttaaaaatattttttataatctacattcatccctactgggaaacatttactcaaatgatctgcccttctatttatggcatctagaaaaatatattcttagattgatggaaagttgctactgttattttagccaacaaatattgctttactgttgtttaacgcattgtttaagctactgtatatttttcctgctgtgtgtgaagccagtgttcagccttcacacactgtggtcactgtggtttgtcttaggtgctccaggtgggaaaggacagccgggagatgtggggcctcccgggccagctggaatgaaaggcctccccggactcccaggacggcctggggcacatggtcccccaggcctcccaggaatcccaggtccctttggagatgatgggctacctggtcctccaggtccaaagggtaggtagtgctttttccatgatgtcctcccatcttagaaacatgaaatccactgccaagtgaagactggacagatgaccacacaaaaagagttaactgttagtctggctttgtccttcccttaatgatgcctcccttgctcttgtcctctgtatcgttatttccagtggcgaaatgtttctgtaccggtcaatgggaaaaggggtttgtaggtgttagggccacagaattcatgaagactgggtagcacggtaaactcctagggtcgggaagggtgcattttcattttggagggggtccccactctcatccctaccccctgttaggggattaggactcagacacatcagggcccacacttcaggtctgtaggtaggaaactgaggatggggcggcagagcatggaatttttattttatttttttattttattattattattttttttaggagacagaggcttgctctgtagcccaggctagagggcagtggcaggatcatagctcactgcagccttgaactcctgggctcaagtgatcctcctacctcagcctcctgagaggcatgtgccaccacgcctaattttttttttttttaggagacaggatctcgctattttagccaggctgatcttgaaatcctggcctcaaagatcctcctgccttggtctccctagtgccaggattgcaggtctgagtcaccgtgcccaactgagcccagctactaagtgcagtgaggttggcaattgtttactttgaatacaaactcagcgttaggcaggagtttgcatctgtagatgaactacgaggaacacaatatataagaatcatactagcctgtaaaatgttttcctagggccaggcacagtggctcacacctataatcccagcactttgggaggctgaggcgggtggatcacttgaggctaggagtttgagaccagcctggccaacatggtgaaactccgtctctactaaaaatacaaaaattagccaagggcggtggctcccgcctgtaatcccagctactcgggaggctgaggaaggagaattgcttgaacttgggaggcagaggttgcaatgagccgagatcgtgccactgcacttcagcctgggtgacagagtgagactctgtccacctcccacccctgaaaaaataaataacaaataaaatattttcctaaaactttatgctctcatttcaccaggaccccgggggctgcctggtttcccaggttttcccggagaaagaggaaagcctggtgcagagggatgtcctggcgcaaagggagaacctggagagaagggcatgtctggccttcctggagaccggggactgagaggggccaaaggtaaataaaatacagccatgcaacatgcatttgtttctggtatttgatccaaacctagaaatgtgatctctgaaaaataaaataggacttgtctgaagcttggattcctcctccttttagttctatggtatttgttttagaattttaaacaaaattcattttctttacctcttaatcttattacatatagatggcaaatgaattgctctattaattgaaaaagaattaacaagtggttcttaatgcactgatttatagcttctaggtttcaaagaactttctcaccttttgggaaagggggctcttgttctccaacctctgtttcagttagaacagaagttggtaagctcttcctgtaaaaagcctgataataacaatttcaggctttgcagaccatctggtctctgtcacaacgactcaagtctgcttttgtagcatgaaagcagacatagacaacacagaaacaaacataaaatacaattttcagtaagatggtatttatggatactaaggtttgaatttcatataattttcacaccatgaaatattaccttgtttttgagttttacccctcaaccatttcacagtgtaaaaatcattcgcatctcatgtgctgtacagaaactggcagcaggaaggatttggcccatgggctgcagtttgccaacttctcaactaccatgagtccactttcatctgggccacgagtagagtttccccaagcttcatttgaaaaaaaaagttttctggccaggtgtggtggctcacgcctgtaatcccagcactttgggaggccgagacgggcagatcatgaggtcaggagatcgagaccatcctggtaacacggcgaaaccctgtctctactaaaactacaaaaaattagccaggtgtggtggtgggcacctgtagtcccagctactcgggaggctgaggcaggagaatggtgtgaacctgggaggtggagcttgcagtgagcagagatcatgccactgcactccagcctgggtgacagagtgagattctgtctccaaaaaaaaaaaaaaaaaaaaagaaaaagaaaaaaatgttttctttactatgaaaaataagttttgagaccaatggtttaaatattatgtccccatccctgttaaatatttactcctactccttagtcctgtggctctaatgggtgaaggtagtatttcctttccagtgttgagaaaaaatgcttgacaattttcagacccaaggatttttgcccttaaggccttttgggcaagtagcctcatattgaattaaaattaccttttcttcttagttgattgattctaccacaattttttgttttactagcttgtaaattatttatgtggaatcaaagaatcaaagagtcactctttgctagcttagataagtgatgtttgctgtgctattatgctactatacaattatcccactaaaaattaaaatttggactaacgccagtgatgggctagtaaactagttctttgaaattaaaaaaaaaaagcaccgtggtttatagtgtttgctgagtgtcatggcataaatactcctgccacggctgatttaaagttagcaatggtttaacaactggcttgcagggttcttgaattgtggtaactggcactcgtcaagctggtaggagcccacgcctgcacattgctacagctggccagtgtttgcaaaatcaggcagaagtacggtatgcccttcctacctttcagaagtcagtgtgaggggtaccacattgagataagtgtctgttcttttaatataaggaaagtaagagaggatggctaggaggagatatggaactggaaatatgagatgggcaaatccaaattttatagaacaaagcgacatttttttagactggaacttttcaaatctgtcttaacctcagtgaagaccccgaccagtttggttgaatttggcaaacattcagtgagcactcctggcacaccagactctgtggctggacaaatggggtcaggaacgtaaaagatgactgaccttcctttaggaaatcagccaacaatggtgacattttgtgatctacataaatagagcttcgtaggttaagtgggaatttgcgatttgggagtgaaatgtagtaatggataaattatgtgtgtgatgttcctgttcattttgttcttgcataattaatatccataggagccataggacctcccggagatgaaggagaaatggctatcatttcacaaaagggaacacctggggaacctggacctcctggagatgatggattcccaggagaaagaggtaaacacttaagagtttttaaccatatcaaataagttgacatttttacagatcacatttgttaggcaactttccccaataacactgagattagaaaagacttttttttttttgagatggagttttgctcttgtcgcccaggctggagtgcagtggcaccatctcagctcactgcaacctctgcctcccgggttcaagcgattctcctgcctcagcctcccgagtagctggaattacaggcgcatgccaccacgcctggctaatttttgtatttttagtaaagatgggggtttcaccatgttggccaggctggtctcaaactcctgacctcaggtgatccacccgcctcggcctcccaaaatgctggattacaggcgtgaaccactgtgagaaaaggccattttttttagatataaataaacacaaataaaccttgtggtacattttttgcttctccatgctaaaatttagctgaagttcctgtgtactcctagatttggatattctaaactgggatcaacctgagctatacataaaatactggtttcaggtttggtagttggttttaaagtgaatagcgcaatgactgttcaagtcattgtgaccagtgcctctcaaacttcagagcacattaatcacctggagagcttgttaaaatgcagattctgattcagcagctctggggcagccaggtatcctgcctttctaacagacaccccaatgcccatgctaatggtccacagaaacattgcagagcgaggatttttgacaaccccatttgtgtgctcctccaaggtcagacttagtctgcatgaggtgctcatcttggcttctctcagctagttgttagagggcaaatattttaacttttctgggtaagtgcttcttcatttgtaaaataagcagcggaggcaaataatcctgtgtgctccttcccacctctgatagtccttagatattcccaggcagcttctttcatcaatgaggtcactgaagccagaaatgatcaggaagcggcttgggacagcaatcagaatcctcaatacctttggctttatctcctaaaagtaggaccaggtccctcagcttaactattacctagctcaaaatttcagcagagacctgtaacacttccaacttcatcaggtgataaaggaactcccgggatgcaagggagaagaggagagccgggaagatacggaccacctggatttcacagaggggaacctggtgagaaaggtcagccagggcctcctggacccccaggccctccaggctcaactggtctaagagggttcattggttttccaggacttccaggtgaccaggtaaggggctactgctttgtgggggaagagacaataaaacctttctgttcttaggatgtccgtaaggagctataatttgccagcgtatataccattgccctttcactggcttttagaatgtaaggtgtagctcaaggagaaaatagagccttctagaaggccacgatgaaactgacatttctgaccagtgctcctgcctggttcccctaacatagagtcatataatcgctatctcccagcctggtttaaaccacccatgaagacttgcctcatgaccactggtttactggaatgaaagtcgtcctgaaaaatcacccaaatcctgtctttaaagtcttccagtttcagatatcacagattttgctttcaatatatttcgtcttcacaaccatgagtaaaataccctttcagaatccaggaggtacaatacatgtagttgccaacattatacttctggaaaacacgtaactcactatccatcttttggaatgaaatggatttgtaaagtctttcatatgctgtgatttataatactattttatttagtatcaacttgtttatttgtaatttaaaattcaaattagtaacacaattactgtttcacaaccaagtgtagagaatgggatgctaccagttgcgactgagaactctaattctggagaagctatatcaactttgaaaaactagatacatgtagtgggaggcttgcatgcatttaaactttcgttaccactgcagattacaaaaaccaaattagttacagaaaattacaactggatcgtgttgtgcatgtgccatttgtatttgaaatctgattaaggccttttgtttcattaaactgtcagggtgagccaggttctccaggtccccctggattttcaggaattgatggagcaagaggacctaaaggtatggtttggagatacagaagccatctgtcaaatgcatagtcccgaatgtttataacattgtaaacaagtgccttttacatgataagcaaagtgtatcaaagaaactgcaacacccaaggggctcttgttagacagtcaaacactcaagatccaaatattctacagttgtcactcagatccaagggtatcagatagaaaacagcatgcctgcaggctcttcgtgtcttcctcctctgtgagagtcccagcagcagtccatggagtgactgcagcccctcaagtaacagctcagttgcaaggagaacagatccatgtcagtgggccgtgcccactttggcttagaaaccctatgtcccgcaggagccagtatcttttctaaggacttcataagtacagcttttagagtcccagttaggacatagaggctaaagccatgactttccagcaggtgctaagagttcacttaagaagtcccaagatagatgtaatttacaattgggttttttattattattattatttttttactatagcaaaatatttttttcctaaagggccagatcataacaattttcagcttgttgggccatatggtctcagtcacaactattcaactgtgttgttatagtgtgaaagcagccataggctatatgtaaacaaaggagtgtggctgttttccaatagaactttatttgcaaaattggctgcaggctagatttggccccacgggccttagtttaccttgtgtcaaaaacagtgctgcattgtaacacacctaacattctagtgaaagagaggcttcattaaccctttattcagacaaacaagtaaacaaacaaagagcaggatatcttagttgcaatgtttgcataaaacctttaatagttttactatcttggtataccattgggttaatatttttctttaaatctactttaaaatgatttacctttttaaccttagccttagcgtaactagctgtaaattcacaggttaacatgcagttatcctttattttgatataagttaaaagaaatttaaaatataaaatactaattaatgaatgacctacaatcctctgccttactactttgagagacactctataaataatatactaaatgctataacaaacatgacctgtgtgggcttatttcttcagaaagaataatatagatcccttcttgggaaatggttacaaatggaaaaagttttatatttgattttgatattttataactttggggttcagaagtcactccttttctgcttacctatacatttattagtctctttaccattctttcacagtaaaaacctacctcttctcacttccttcatgcttgtattgggccatgcttaaaaggaattgaaatgcactcaaaatacctggagtcaaagatgtctcatggatcccacagataggagacatagttctgccaaagctaaaggaaccctagcccttagtcaatccatggtttctcactttttcccatggtctattttttcacttacctgtctaccaactggcttcatctctgtctacacagtatcttttctggatatttctggatatgttgggttgtactccaatatgttctacatcaggacagctcatgataatgcttttggtttctgccccagtagccaaggacttcaaattctcactttcttattccatcttctcaaggaaagacttgtttgacctggaatgggccagaatcccacccctcaagcaattggccattattatgagtaaaatcagataggagaaagacttccacaaggtgctggtggaactcctttagaaaggagtgtaaatgggcagttactataagatacatctaacttacctctgtaattctcttgaaaccccatctattttcttgcctttcctcccactccattttgagtcctccacttcaaactggctcccaaccataatgtaggtccttgtgtctggaagcattatggagtgaccagtagctttgtgggactgtgggagtcatggcctacagtggcttttgaatgtgccatctcttgtcatcaatgcagtatgcctttgtgattttctttttgcaaggacactgagttgagctgccttataaaagagcttgaaatatgattgcagcagtgaaaacagttacaatttttgattttggtttctaaaacataaggatatagccactcaatgccaaataatttcttaaatagaaacctaaagttgaaaattttttcaggacttaaaaactcaaacttatcaatacctggagatccttatgattgtgatgtattctaaaaccgtgtgtgtgtgtgtgtgtgtgtgtgtgtgtggtatgtaaattgcatcttgcatctatatttctatttgttcttatttagaataaaagtatttaaaaacactctcctaaaatatctgaagataagctatacaaataccataaacgttactgtcacctgtatgagaccaaattaaattgtctaaagtaatgtcacatgcattttatccctttcaggaaacaaaggtgaccctgccagtcactttggtccacctggtccaaagggtgagccaggtagccctggatgtccaggtatagctgcatatttttcttactaaaacaaaaaaagtagtttagtttgaaaagcagaacaattacttctagctggcaatgatcgtatcaatattttcttacccctttgtgcattaaggtatagataaaacgggttatatataaacacttccatagcatttcttgcctggcctagaagaacaccagggttacatactagggattcacaatcatttttccatcatggctcatgtgaccgatgatgttgacacaataataaactccccaggcatgcccatattttggcaaactcaaaaatgaatattgcaaacaattaaaatctggaccattttgcaccctctatcatttaaaatgatgcattcgcaataaccactcacaatgactacagctgcaggttgtcattccagctctttctttctactgagaaaagcacatgccagtgtaagtggtgcgccattgttgagccatcattgaatctattttaatttactaaaaatcaaaccaaatcaagcaaacataaacctcatcaccaacaagaaatctaagtcattttaaacagtattttgcttctcaataataatttaacatggaatccttcagaatggattgtgatgcaccattgagttcttgtgacagttgaggccacaactggctacattagatgacccacagcagaaggggggtgccagtgttatgcacagctccatgctttacagggaaagggaaaccatttgagttcaagccgacagaacaggacccctagaggggaaagcagccttaggacagaatgttctattggtttaactcatatatgtttacatttcagaaaatgttgcagatattaattggtactccctttctggaccctatagaaatgcaccaatatttaaaatatgcatatcgcttgacttaggaattctcttaggaatttatctggagtcagtaatcagacaagtgtacaaagatgcatgcccaggaatatgcgttgtttgaatggaacaaatgtccattcacagatgcctggttaaataagttatatcccagggcactcagccaatagtggtcaggttagaaaccaggtttgtgtttagatgggtaccttgtaaattaaaacacctcatatcaataattttgtgcattatcttaaaattccatctggcaatagctgtgtttcatttcatacaacagaaagaatattagatattttctgagcagaactatatgagaaattttattttctttgtttttatactgtaagattgctaaaatggaagtctaacaaaaacaagttaatacagtggcacaaactacctttcccaccttctttgctatgggtctttcacctctgacatgaacaaatatatttagatatatatatatgtacatatatatctaaatatatatatgtatatatgtttagatagtatatatgtatatatgtatacatatatacatatatactatctaaatatatctaaatatctaaatatatacatatacacatataaatatatacatatatacatatatacatatatacatatatacatatacatatacatacatatatatactatctaaatatatatacatatatatgtatatatatgtgtatatatatatgtgtatatatatatgtgtgtatatatatatatgtgtatatatatatatatgtgtatatatatatatatgtattttttttttttgagatggagtcttgctgtttcacccaggctggagtggagtggcacaatcttggctcactgcaacctccaccttctgggttcaagcaattctcccaccttagcctcccaagtagctgggactacaggtgtgcaccaccacaccagctgatttttgtatttttggtagagacagagttttgtcatgttggctaggctggtctcaaactcctggcctcaagtgatctgcctgccttggcttcccaaactgcttggattacaggtgtgaggcactgtgcccggcctagacatagtataatattttaactgaactgtataactgaagtatacatttgatagggaaaatagttttgaggtcagcattatgggagttcatgacaaatatcaaagtgagaagcctcagaagggaaaaatcggtggctcaaagtcaacctccattattacttcacctgtggtcttgggtaagctgagagtatcttctctgagcgtagttgcctcacctgtaaactggccctatgcatactgcaggattgtcctgaggatcaaatgaaagaaactgaaactgaaaataactatacaaaataaaatgcaatgatcatcattgtcatcatcaccatcatcagtcagcaaaacatgaagacattttcccatacttactggtatttttatgtaaaccccaaagataggaagatttcataagctcagggtagtccaaaatgggggcctgtgatgttacctagtattttaacttaaaaatcataaacctgagtgattttacacttaggctgactttttcagaaagtttgccttggccaaatttgcctgttctcctgtggttaccaccatttaaattggcccctttcccatatgccatggcctcagcttagaaattttaaattgtattatatgttattcactagcacagagtttacttaatacactatttccattgactggagaaggcttcattgaacttgaatgagcatcatgagaaggcatgaatctgcagctggtcttgggattatatgtgattatcctgggttcagtcctacctactctgcactctattcagagagaaaatatagtgcaaattaactcagaagttctgttcttaacacaaccccacaaaattcaggagacaagtttttatttttaatatttcagtgttttcatttgtagatgagaataatgctactttactgtaggaatgttttcaggataaataagataatacatagtgagactaatagatgttaaattcaatcagggaacaggtacagactaacaaaagcttgtttcctgtgtgctataataaatgatgactatagcccccccagcatggtttgtaaatacagagacatatattttatgtgcagattcaaccagtgattttcagcacacactattggtttatcccataaacgtgcattaaactcatacattgtaaataaacacacggggaaatagtcatcctctttagtaatcaaagaaatgtaatttcaagtgtctgaaatatcattttatctttaataaattagcaagaaaagaggccaaaaaactaaaatgtcctcagtaagaacacggcatgctcttggagctgtgggtgggttccatatggtggtgtgagtcagtgcagcacttactccaaactactggcaacctgtatcaagaaccaaatgttgaatggtctgttctagaaaactagagaagaactgaattgtgctctgcagcaagtcactgtcataagaaaaggactgctttaaatttttagaaattgaagagacctatccattagatgttatgggtgattctgggatggaacgtggtgtggagaaaccaactgtgaaggacattaaggggataattggggggattcaagtatgggatgagtgtttgagggtattaagaattgctattaattttcttggctgcgaaatgttattttggcaatgtagaaaaacgttcttatttttcagacttcttacctcctgaagtatttagggatggaattacactacggtgtgatgtactttaaaatacttcagcatttaaaatgcatttgaaaataccaaaatatcatgctatttatccagaaattctactcctaggaatttttcctaaggaaacaatttaataggagaaacaaaattgacaagagatataaagagcattatggataacggcagagttagagataacttaaatggccaatagtaaaataaattgaattagttaatttaattaagattgactcaaaaagctactggccattcatttaaaaatgataattaggaaaaccaatataaacttggaaaattacttatgatacaacactaattttaaaaaccagaatataaaattgtgggtattatctgtacatgtatgtacatatgaagaattgtgttaagctggtgggattatgggcattttgttatcagtttttccttaacgttattttcctttccaatagaaactatttaaaactaaaaaagtaaggatagaaaagaatagggtgggctgaacttggtgattttaaagattcactgtctcaaacggcaactctgatgtttgatctttccttctttagggcattttggagcatccggagagcagggcttgcctggtattcaagggcccagaggatcacctggaaggccagggccacctggctcctctggaccaccagggtgcccaggtaccttgaaaggaaatctggagacttcctgagcactcttgtgtctcagagtgtttcagaaaccaccagtctttaattagacctaaattcagatatggctctgccatttcccagacctgtgactttggataggtcacttaagctcacctatgcctcacctataagctagtgggtttcactgagtgacttggagtagattaagacagcacctgtaaagtgcctagcatggcaccagacacaaaggaatggtcagacagatagcaactcctttctttttagtttttattcttttagagagagagggcctcactctattaacaaggctggagtgtggtggcacaatcatagctcactgtagcctcaaactcccgacctcagggaggctgtctcagcctcccaaagtgccgggattacaggcatgagccactgtgtctggcccagatagcagctcctttctagccctttgcatttctcctgccattcaggatgctgttttgtttgtttgtttgtttgttttcccctcctttagacctaaggcagatgtcacacttacagcacagtgttttaatggatactattcctgccaattcagaaaaaaagagaaagtttcaaactatagttggcaacttcatttatttggaaatgtattttctcctcctgaatttaaatgtatttttctccctagagttaagatgtataggaagaaaaagtaattagacagtgttctccgttacccatatattaagaacatagatgacttttgcagtgaatgtaattcatttattatctggccatctgcaaaacttccctgtcatcctcaggtgatcacgggatgcctgggctgaggggacagccaggagaaatgggagaccctgggccaagaggcctccagggggatccagggataccaggtcctccgggaataaaaggtaagtcaaaatgaagcccatcccacaagaaagatgcagcccaatgagggcaaattgatggtgtttttttcctgtaccagtgagtgaccctgctcttggttataccactcttttccgtaggtgccattagcatcttcctactcttccttagccagggctgcaggtagtgcccatccagtcagctgacctgccttctaccagggagaatggtagtgctaccattttctttctttctttctttctttctttctttctttctttctttctttctttctttctttctttctttctttctttctctttctttctttctttctttctttctttctttctttctttcttcctttctttctttctttcccttccttccttccttccttccttccttccttccttccttccttccttccttccttccttccttcctcctcccttccttccttctctctctctctctctgtctttctttcttttttccttttctttccttttcttttttctttttttttgatggtgtcttgctctgtcacccaggctggagtacagtgacgcgttctcagctcactgcaacctccacctcccaggttcaagcaattctcctgcctcagcctcctaagtagctgggattacaggtgcacatcaccatgcctggctaatttttgtattttttagtggagacggggtttcaccatgttggccaggctggtctcaaactcctgacctcaaatgatccacccgcctcggcctcctgaagtgctaggatgtgagcgcccggttgctaccatcttatttctgaaggcatttagccaaatgatttttatgatgttcaggcccattattcatgtattcccttcacctatggttaagctcctactatcctagattctgtgctagatgctgggtgtacagttttgaagaaaatagacctgcttcctgccctcatggagctgacagtatggcaggagagaaagacattaataatatatgtggaaatgaatatatatttactgatcatgataagtggaagagaaaacaataaggtgctacagatatagaataattagtgttcatcatcttttttcgatcaagaataattttttctgggttgaatttcttggtctgtaaaggcaatagtggactggttataaaagtctggttataatataatataatacaatacaatataatataaaatacttgtcattaataaatctttatgccctcacattcatccatggtatcaacccctcttcagtccatttcttccactttagaaaaagtacttttttggccgggtggctcacacctgtaatcccagagttttgggaggctgacgtgggcggatcacttgaggtcagtagttcgagaccagcctggccaacatggtgaaacgccatctctactaaaaatataaaagttagctctgtggtggtgcatgcctgtaatcccatctactctggaggctgaggcaggagaattgcttgaacctggaaggtggaggttgcagtgagccaatatcgtgccactgcgctccagcctaggcaacagagtaagactccatctcaaaaaaaaaaaaaaagaaaaagtattttttctatgggtatttttgaacatatctttagcataacacttacgttgtatcacatttgtttggaggtttttctcatcaaacagagtatgattttttaaaaagcaaggacatttcatatacccttgagacccagtcaataacaagtatattggttggtggtatgaatgaatggacaaataggagaatgaatatctgagctagtagatatgaggttgcagtccttatctgaaccaacagctgatggttccagcttacttggtagagtcttgtaaccaggtttcctctatttcttcttcctttctccttccacctgcctttgctcattgactcatacgtatacgaaatcctggtaaaataaaaagtccctcctttcagaaggtactgagttggaaaccccttcttctgggattaatccttttactgttttgaaaattcaaatacgattttcccacactttgccctcttcactcattggatagctttgaaataattctaattttccagaagtggtagtgtggtaggtattacttggtgcaagtctgtggagacaggagccatttatgttgaagagttggtatactcatgtattttcacacaatcacataacttgataggaaaagttcccttcacaagacatctttgtactgttctccgtcttcattgacacttttagtaatatgaattccagcaattcatgataaatttaggatttcaggcaaatgatcattctgttattttgaaagtttctgtggtgattgtggccatttcctgtctctgaccatctctacagccttcatggcgtattctttgacacttttttgtgtccggaagacagttggtaaagaaccaaaagaaaacatttgtcatcattaaccactcccactttttcctaccctccacttcttcctaccctcccagtttagtaacacagcaaggatttttaagtgtcttggtggcttaaaaacatacacccaatttggtcaaaatggcagggctcatgccactgttgttgatctttctttcccttgaatttgtttgcatttatcacataacttcagtatggcatgctattacaaaactaatagctggccgacgtggtggctaatgcctgtaatcacagcactgtgggaggctgaggcaggcggatcagctgaggtcaggagttcgagaccagcctggccaacatatagcgaaaccccatctgtactaaaaaaatacaaaaattaggtgagcgtgatggcgggtgcctgtagtcccagctacttgggaagctgaggcagaagaattgctagaacccaggaggtggaggttgcagtgaactgagattgcaccactgaactccagcctgggtgacagagcaagactctgtctcaagcaaaacaaaacaaaacaaaactaatagctaataaatttgatccataacaaaatcaccccaaaattaatctccaatcacatcataattccgtgctatgaaatagtgtgttaaaaagagaaggtgaggaaatgaacatattacttggcatgttcataccacctacagacagatgttgcagtggtgctccatcaccatatagtgacactgtttcacttcaaacagctcagagaacaactggtctttaaaaaccacaacacaaaacaaaacagtgaaatacattctgaaaagttaaaacatctgcagtataaattcattgttgcagcttatcatgctgatataaaaatgaaccacactccagcagaaacactttgaactgagaaactaaatatttgcagtatgttctaactaagtcaaggggactgattatcttgtttgaacaaaccagctgctgaactcaaagctgtttgctctgctagaacaggccatatggattttgcatcctgcttgtgttcaatcagatttaaactttaacttaaacatatgctaaaaatggcttgattccagctaccattgactttcttcacataattacaaaaaactactttaaatttcaaatggaaccaaaaaagagcctgtatagccaagacaatcctaaacaaaaagaataaagccagaggcatcaggctacctgatttcaaactatagtacaaggctacagtaaccataacagcatggtactggtaccaaaacagatatcttgaccaatggaacaaaacagagacctcagaaataactccacacatctacaaacatctgatcttccacaaacctgacaaaaacaagcaatggggaaagggttccctatttaataaatggtgttggaaaaactggctagccatattcagaatactgaaaccggaccccttccttacaccttatacaaaaattaactcaagacggattaaacacttaaacataagacctaaaactgtaaaaaccctagaagaaaacctagacagtaccattcaggacataggcatgggcaaagacttcatgcctaaaacacctaaagcagtggcaacaaaaggcaaaattgacaaatgggatctaattaaactaaagagcttctgcacagcaaagaaactatcatcagagtgaacaggcaacctacagaatgggagaaaatttttgcaatctatccatctgacaatctacaaggaattcaaacaaatttacaagaaagaaacaaccccatcaaaaagtgggcgaaggatataaacagacacttctcaaaaagacatttatgcggccaacaaacatatgaaaataaaagctcatcatcagtggtcattagagaaatgcaaatcaaaaccacaatgagataccatctcattgccagttagaatggagatcattaaaaagtcaggaaacaacagttgctggagaggatgtggagaaataggaatgcttttacactgttggtgggagtgtaaattagttcaactgttgtggaagacagtgtggcgattcctcaaggatctagaaccagaaattccatttgacccagtgatcccattactgggtttatacccaaatgattgtaaatcattctgctataaagacctatgcaaatgtatgtttattgcagcactattcacaatagcaaagacttggaaccaacccaaatgcccatcaatgatagactggataaagaaaatgtggcacatgtacaccatggaatactatgcagccataaaaaaaggatgagtgcatgtcctttgcagggacatggatgaagctgaaaaccatcattctcagcaaactaacacaggaacagaaaaccaaacaccacatgttctcactcataagtgggagctaaacaatgagaacacatggacatagggagaggaatatcacacactggggcctgtcagtgggtgagaggctaggggagggatagcattaggagaaatacctaatacagatgtcgggttgatgggtgcagcaaaccaccatggcacatgtatacctatgtaaaaaacctgcacattctgtacatgtatcccagaacttaaagtgtcatcatcatcatcataaaatggcttgattcctagactttaagtacaaatgccctttaaaaggagaacacccagttcctagttggaaagtaatataagattgaaataatgaaaacctaaagaatattacctgtagcatgacaagaactggaaagaatatggattttgtatccatatttactggtagcaagtaaaatgtttcataagaaaaaagaatctggaaatggctttcctcagaaaagagatgccatgtcccttagagctatgaacatcatggaaatattctccccccgctttttttactagattactctcctcctgcccttcccccacagcacttaccacactggatgtaattgcctgtttgttctgtcaagtcagggacagacttgtcccgcatcgtcttgacagcacctgccaggaggtacatttggggcagactctgtgcattaggaaaccatatcttacacccttagtgggcactcacatatttgctgatacaaaaaatatttaaatcttatttcagaatctttgttaataagaatcttccaggtttttcaaccattacttatagtcacaaagatctctcttcccatcagctttgaagttagggtgagcagctgtcccgttttgcctgggcctgagtgggtatttcaggatgtagaaatttcagtgctaaaaccaggaagaagtcgcaggcaaacagggacacgttggtcaccctatgtgttaaaagtatgagcccatataaaagctcttgggtgtgtcgagtaatgttttcaggctttagaacaaaatacagcctgagagtgggaatgcagtcataaagagttcgctggctaacaaagatgggagccacaattccagctggattggaggttacattcactgactagagaaagagcacccagcctgaaagtgcagtgtgctgcagccttaaatgatggttgtttagcaggaggatgaccagagaggtgaataaaaattcctcattacccagaaatgtgctttgttagcctaattgcctctcatctgcactgtatatattttatgcatgaacaactttctgatttagagatgggattgataaaaagctttcagtaaaaaggaaaaattacccttacaaccctactcagatgtagctgcattcaatttagaacgataacattgggtcagataagggtcggccagttcaacaatggcgagaggctgggaccgtgacaacctaggatctggatgtgttgatgtgacaatggagagctggcagaagcagagacattccaccccagccaagtccccaagccatcaatcttggtgactaaagctggagatcaaaacatgtggaaatagtgaagtggtccccccgaaaatttatcatttcagatagattgcaataaatacccagatttggcagataaagaaggtctgtgtgttcttttggtgcaaacttgaaacgttggctcataaaataggaaagaggattggagaataaactaagccagaactgtaaaaagtggttaggaataagagatttggggaaaataaagatgcattcccattttttttttttttttggtgcacgagaatatggctcatttgaaccaatctaaatcctagatcttaaaagaataatgactgtctgtttcaagtactgatgataaatagaatggaagcaactaactgtgccagcttctaataagaatacacagaggacttgcttaaaatgaatagacaataattagcacttgaattatttatatgcaaactgatacctctaacttctgtaaattatatttgtcctataaatctattaaagaaagatatggcatacaaataaaaattctaccctgctcctttttgtagctttctccctcatccaccttgttccatattttttcattcagtcactcaacaaacatttattgaacacatccataggacctagtcttgaactcctatttacccttgagcaggggagacagtcacccaaagacatgattgtttcacagtgtggggtggacatcaacaatcaagggggtcctatatcatgggggtaggtgaggggcaccttctgtgttcaaccttataagctgatggtatttttatcccaaatttgagagatgtgaccctacactaagtaaacaggctggctgtgcaccgagaggctctatacaccatggaatactatgcagccataaaaaatgatgagttcatgtcctttgtagggacatggatgaaattggaaatcatcattctcagtaaactatcgcaagaacaaaaaaccaaacaccacatattctcactcataggtgggaattgaacaatgagaacacatggacacaggaaggggaacatcacactctggggactgttgtggggtggggggagggaggagggatagcattgggagatatacctaatgctagatgacgagttagtgggtgcagcacaccagcatggcacatgtatacatatgtaactaacctgcacattgtgcacatgtaccctaaaacttaaagtataataaataaattaattaattaattaattaaaaaaaaaaaagaacagctactgggtggaagatctactgatgagataggaagttttccaggcttgaccagaggctgggaagaagcttcagtgctcgtagccatcagtgggacaggacttgtgagaaggcacccagcagatggctcagtgccctggagatgctcgataaatattccttacctgctttcttccttgcctctcctcctccaactttaccaagggccatcaagaagtgtcatttgaaaaggctctcgttcagacaacttcaacacaactcaacatacgttgataaaaaaccttaaaaaaaattttccactggaagtgtttagtgacaacttcagtcaagccaggctggtggacggctctttggagaactaaacagaaggttctgagagaaggcacaggcatcagtggggtaatgtctgtttacacagacgggagttttcagtgatcatcgcaaaataaacttaggttctgcagaaaggcatcagaatggttgtgaaagaagtgactgcaaagcaatagctggagccacactcgccatgcaggcctgagcatcgcagggcaagcatttgccagcatgccacaggcgccatgcgtcctctcgtctgactgcatctccatgagtagatcctgaagaaaccaggagcctgcagcccctaggagggtgcagtgaccccaagcctgggaggtgtgaggcctggatttgctcccatccgatctctttcctcatgtagggtgattttattgtcataaaatcaaaggtcacttcctatgccaagattcagtaattctagaccatatctggtcacgataggatcagaaaccaacagcagtactttaaaaccaaagaaatgtttgtgttaagctgtcttggcagaaaatctttaccggatgaatgtgttaaatagtcctgggcctgggtttccaccctgatgatgaagtccagacgctcagagctgtttgctggccccagcaacgcgccctctgctgggcagtgcctgcgtttgtggctagagtgagtaccggtggctggtcttcctttgggtcacaggcctgtggtgtttttcaggtccctccggatcacctggcctgaacggcttgcatggattgaaaggtcagaaaggaactaaaggtgcttcaggtaagcacctaatcgattcgtaacagactgagcttcagtccatggttcatgagagaaagtggtaccctccctggtatttctgcacttcatgagatttggaggcaaaactgaaaaaaactggcttaggttagagacacactattggagctatttttagtgctgaaaatgacatatgaaaaggacatttgagaaaaccctatttaagaaggaatggttggttaacagtgtcttttgttggtattgcttggaattttctgtccactaaaagtactctgaacaattgagccagatttcaaaatgttatcctaacaagtaaatagctggggattttagaatttttgtattaagtatagtaatgctatgtttgaccacatgggtcaaattagtactaatagcatccttttatggccactgctaaaacaaattacctacacaatttgctgttattttcataccgcaaacaggttaatctttgacaagtgtatcttgttctgttagtataatgcacatttgttgcgttactttctcagaaaaaccgcttatgatcagacaaagtagctgaaacctaacatgcaaatttgagtgaccctggggaagaggaattgtgctgctaggtttgaatttattgttggagagaggtgaaatctttctagtttggaagatccagtaatatagtcacttaagattcatttagtagatcctccaaatagattaaatgtgtgtgccttccaagaaaacactgatgtccttccttcccagtgtgaaattccacaatagttctaatcatgccagtttccacctcaaatttcaaagcaacttatgcataattacttattgtatctcatttgtttttactctctccattgtagaggtgggaggttggtattgcctctaagttgttgttttttaaaatctggaaaataactataaaagaaataaaacttatggctgaccagtgtgataggtcctaagagagaaatggtgcagacatttggatcaccactgcaaccagttgttggtgtctgcagaaccagccactcctctgccgctattgggaagtggttccttttcaggcactataacagggacaagaaaagagaagatatagtattaattctgttttccccattaaggtttgcatgatgtggggccacctggtccagtgggaatacctgggctaaaaggggagagaggagaccctgggagcccaggaatctctcctccaggtcctcgtggaaagaaaggtcccccaggacccccaggtaagctgtagcatgctttgcccttctttcaataactaaaccaaaaccttccaaatgcaatgaggataacatgtgaacatgtctcttcttagggagttcaggaccacctggtcctgcaggtgccacaggaagagctcctaaggacattcctgacccgggtccacctggagatcagggacctcctggtcctgatggcccaagaggtatgagagaatcatgacaaaggatggcagtgctccctttgttagatgctgccagctctggaggaatgtgggaccagagagtggcagaatagaagcactgaagcagccccccatcagcttggcaggtcgataagtgggacacagttagggtgggactttgggtagtggtgggctctcaggaccatatccaggaccaggacttggccctctcttcaatttcagctctgttagaccctcgtctcttcaggctagaaactgataagcaagcgtttcttatcaccagcttgatgctgaccaaatgtcttcagaagtgggtggcaagtgggaatcgcaccctccttgttggtctctagcaactgtcacataaaccactggcactagcccagagtgacaggatgcaggcttgtggcacacaagaaacagtctcttcatgtgctgctgacagtacatgttgtttctttcatcacttcacagggacaaactttggtaaggaaagatgttggaagtcattactaagctgaccaagtaggtttaggctagagctgggttgggagttgggagaagagtgtggctccgtgtgatatcttgctaaatgcaggcaattgcattcatacaagctcttagaactcttccataaagacacatgcccatcatctttgaatctttaggattttagggatcatacactgaaaataataaagctctcaaaagtgcgctaagaagtacagaagctaagtaggaatataattggggtcaatttattcctatttgtgggaacttgttttccattaggattataaatttaatcgagtgaacattcctttcccaccagacatatttcctcaaatgcctgtctatctgtccatcagtctatccatccatccatccatccatccatccatctgtccatccaaccatctatccacatatccatccatccatccatcttatctatccatccaaccgtctatccacctatccatccatccatccatccatccatccatccatccatccatccatccatcttattaaagcagtaagatggcaatgcaaacaaaaacccaaaatgatattttcaacaggaatgactttgaagggaaggaaggttttgcttgggttcattttgtctaacagttaccaacccattatctacaccatttctcaacttggtattatgattcattctatttcatttctgttatcattgactttcttattcttctaattctctttattccttgcttgcaagtcattgaattgtttttcttcggaagctgtcaagcagccagtatacacattcgtctttgactaaaagaatatttttgtctcttctctgtggtcaggagcacctgggcctccaggcctccctgggagtgttgaccttctgagaggggagccaggtgactgtggtctaccagggccaccaggtccccctggcccaccaggccctccaggatacaaaggctttccaggatgtgatggaaaagatggccagaaaggtatgaatgttgttccgttaagtaatatgtgaataacttggttatcttacccttgagggtctggggtactgtgccgccatttctatttcctatgcaaacaaagtgactaccttccaaaatgtccttatttccccaaagagtcctgaagtttgggtcaaagttggacaagtaaaaggaagaaacacaagttcatctttagcccctaataatactcttgataatcttccaggccagaattgaacagtagaaatgtaatgcaagccacatgtgcaatttaaaaatatagtagacacattttagcaagtaaaaacaagtgaactttcatactttatgtgatttaacataatatatttaaatatttttattttaacatatagttaatatacatttatcaatgagataattgagctgattgtgcaaacctaattccttttgcaaataagccactccttcttcctgcttttgaaatcccttgtgtgttccacactgacagcacagctcaggttggactggccacatttcaagtgctaactagccatgtatggttagtagcttctgtattggacagcttagttttagactgctgactttgcttttttatattcctgcaaagatcccgaatcactgaatttccccagtatttgaggttaaaatatttattttaatcaatttttatccaactgctaatatttggggagatcagtttttggtcaccagaatttcagagaatttttaggttcaaagaagctttttgttgaaaaaagatgactaatgagtatccattttaacttccctatttcataaataaggaagctggatatcagaaaagcaacagttgaaatttgcaaaaagagcccagtaacgagcaccttgcctgagttctgaaccaagtgtgaaataaggcaaaagattaggtcacagataaaaatcactgtgaggccgccatgactatagtgcaaatggcatctgtggaattgtgcagtgcacagcctgtagaacagtatggagcaagcctgttcatctgtattagcaatgaaatcaattttagagaatgtggctcaaatctatgggtaagtaggcttccaatgattgaacttcagaattggactgacgtgctaacactctagtcaccaagaggaaggaggaaggggctggctaacactcctcctccttagttactctagggaataaatctctacctggacatgaagttcaggactgaggaaataaaacaccatatgaataccagtgatctacataaggatacacagggagttagaaatattggtggaaccgctaatcatgcttcttgactcccagtccagagaatataaaggccaaacagtgcttcactataaagagagtgagtttcctcagttaccttttatgacttacacagtgacaaatatctcttaggcacctgcaggaatatagcagtgaacaaatttaagtagagtttctaatctcataaggacagagtttccgcttgactcagtggttcatgcctataatcccaacactttgggaggccaaggcgtgaggatccctggaggccagtatagttcaagaccagcctgggcaacacagtgagacccccatctctacaaaaaaattaaaaaattatctgggcatggtggtgtgtgcctgtagtcccagctactcgggaggctgaggtgagaggatcgctggaacccaagagttggaggctgcagtgagcaatgattgtgccactacactccagcctgggtaatggagcaaataataataataataataataataataataataataataaatttcttttataaagagcatagtttcatggaagacagacatgcacatgaaaggatatgtcagtttaaatccagttaagtgtcctgaatgaagagcttatcaaaaagcaactaaacttcagttgggattccagggaaggcttccctgagaaaatgaaactgggtcttatctctaaaaaatgaggaagacatcatggatgtggaagaagtaaaggaacatcacgtatgaggaactgaactgttgtgcctaaaactaagagagtgaggaggagagtggttgaactcgcctggggaggcacgttgttcccggatattgaaagctctttcctgatttttccttcagttccagtcctttgtctccagaggaagtttagggttataggacttcttttcattgtaatttggtcttgtcttgatcatggagccatttccttagttctttcggccgatcatgtgtttccttcagaggcaacccgtctaagcctcacagaagaaggcgaggctaatcttgactctcaggctagctatgccctgcattttgttggagtgaatctctgaattcagtctatcaaactgtcattgtttttatcttgtctcattccagtgccctcatttttatgttttgtttttttttaaggaccagtgggattcccgggaccgcagggaccacatggatttcctgggccacctggagagaagggtttacctggacctccagggagaaaagggcccactggtcttccgggtgagcttccaacctacatacagcattttgtttaaacatttactaaaatgatcatcgttcagaaagtagttaatattctgaattactagcacattcttattatttaagcccttttcttatattaagagtatatttctttcaggccgcactacaaagtctcatgtttggtaaagtaataatttattgtcaaaatgaaaaagtttgaaaattaggagttgatttttttttactttattttttaatttttttctatatatatatattttttattatactttaagttctagtgtacatgtgcacaacgtgcaggtttgttacatatgtatacatgtgccatgttggtgtgctgcacccattaactcgtcatttacattaggtatatctcctaatgctatccctcccccctcccccctcctcccactccacaacaggccccagtgtgtgatgttccccttcttgtgtccaagtgttctcattgttcagttcccacctatgagtgagaacatgcggtgtttggttttttgtccttgtgatagtttgctgagaatgatggtttccagcttcatccatgtccctacaaaggacatgaactcaaaaaaaaaaaaggagttcattttatatacacatttttttttctattttttttttttttgagacagtcttgctctgtcatccaggctggagtgcagtggtgtgatctcagctcactgcagcctccgcctcctgggttcaagtgatccacctgactcaaactcaagtatctaggattataggcgtgtgccactgcgcctagctaatttttgtattttaatagagacagagtttcaccatgttggcaaggctggtctcaaactcctgacctcaggtgatcagcccacctcagcctcccaaagtgctgggattacaggcatgagccactgtgcttggcccacatagactgtttctaagggaaataaatatgtgttccttcatgcaagaggcaaagactgatttgattattatttgttaggatcgtatattcaattccgatccctgaattttcattgattttcctagatgttttatttaattttttttctgtaaattccattcgttcctaggaagggagaaagctattcagtttaactctataggcaacactttttaaccatagggtcaaattacgacaaggaagagttggggagagaaggggcaaacagacatgtgtatttgagatgggcagaagtaatatctttcaagatcctaaatcaatattacggtaatgtggcgtcagttcagaatatttcgcagtatcctaaattagcactctagtccaaagaataaataaatagcactgctttatgatgtatcataggacaggaggaacaagggcttatatgttgattctttttttttttttttttgagacggagtctcgctttgtcacccaggctggagtgcagtggtgcgatctcggctcactgcaagctccacctcccgggttcacgcccgttctcctgcctcagcctccggagtagctgggactacaggcgcccgccacctcacgcagctaatttttttgtatttttagtagagacggggtttcaccgtgttagccaggatggtctcgatctcctgacctcgtgatccacccgccttggcctcccaaagtgctgggattacaggtgtgagccactgagcctggcctatatgttgtttcttttcatatttcctttctatgcataccctatacttggcaaattaatatgaaattttcagaagcttttaaatggatagaattcctacatgcattaaattagaggatatttgccagaagaaatcaactagaattttatattgctcaagagagtttcaagtcattctagagatgaaaactccgttactaaatcatagctgctcctgtcagtcacattgatgtggacattttatgtaaataaggtgctgccattctgcttgtcattgatgctgcctcaaattattatgtatgttcttaatctatttcatttttgtcctaatccacaaatttaaaatctctttccaccctgtgaaaatcatggactggcctcgtttgttgtctttggatccctctaggtcccagaggtaagctttgctataaaattggtaatttcccctcactctggtttctagtcatttctgtacttgtcctttttcctctgtatgtgtgagctaaactttgttacatttttatagatggggtgctgtaaggatattaagctgcagtgttttgcttcctcgttacagatatagtaacctcatattagagcatcctaacattcagcctcattataggttgtcaaggcagtgtagagcctttgcttatatagtttcaatttgggcatgaagtatgtgggctttctctgtcaaaggctatatagtacataaccaatgtaagttccttttttaaattctacaatataaatacctagagcatccctaaaataaatggtatatacaacattaaaaaatggggcctcacctcccagtaaggggctgtgacaagcctttcctatcacaccctcaagtccattttcaaggagcacatttctttgtgtgttaaaaggaaaatgttcacttaatgctctgcagtgcaaaaacaatgtgttattttgtgcctggcattttcaaagaaaatcaaaagcatttctcagaagagaaaaagaaaaattgtgaatgcctgcatttgttctttccaggcctctgttattagtcctaatgaaaattgctgtgaatatagacaccatgtattatttttaaggtctttagaagacaggcctcagctccccctttttatttttcagtttctgacttattaaaaagtaaagaaaagcaaaatcaaaaatgtaaaaagtcctggtattttcaatgtttatatttaaaaattaaactgtatttgatgttttcatttcaatcctgtctctctgtgattgtatgtataaagtcatttcaagagagcatcaaaattctaaataggaagcaccaaacacatgctcccactttctgaactccgttcccactgggaagggccagacattactcatggaaaatagaagatgcctctatgcatctctctcaagtcacccatagtagaaaagccaagttttacattaaactgtacttattataaaaatacatttggccctgtgtggcttgtggttttataccatattttacacagagttaaattccaaatagctcataagaattccaggtcattttacacaggcccagtaagtattaggagactaaaactttgttgttatgccacattttgttaaggattttcttagtgctttatgattgatgttcctgaaattatttcacacttttgcatacatttgaagaacaccatagctaatcagatgatatcttttatttttatttaatttttttggagacagagtcttgctctgctgcccaggctggcgattccaccactgcactcccaggttcaagcagttttcctacctcagcctcccaggtagctgggattacaggcatgtgccaccacacctggctaatttcttgtaattttagtagagatggggcttcgccctgttgcccaggctggtcttgaactcccaaactcaggcagtccacccgcctcggcctcccaaagtgctgggattacaggcgtgaaacaccatgcccggccagatgataccttttaaaatatgtttcatttcttagaatttgttacccagatattgagagttcctgatgcagtctgatgaggtggttaagaacatgggtttggagccagaatgccctggattgcaatccagactctgctgtgtgtaagctgtgtcaccacagaagtgtcacttatttgcctgagcctgagtggttttttttgtttgttttttgttttttttttttgagacagagtcttgctctgtcaccaggctggagtttaatggtgtgatcttggctcactgcaatctccgcctcccgggttcaagcgattctcctccctcagcctcctgagtagctgggactgtgcaccaccacacccggctaatttttgtatttttagtagagacagggtttcaccatgttggctaggatggtctcaatctcttgacctcgtgatctgtccatcttggcctcccaaagtgctggaattacaggcatgagccaccgcgcctggcgaagcctgagtgttcttgttcatacccttctcataacagtagcacatacacagtcttctcgggaggatttaatagtaaaagcattcagcacagggcctgatacatgataaagcattcagtgagccttagctgttgtcattattgttcagtgttattatttcttatccctctgtgatgtttgcaggatgactgaatgaagctttagaaaagatgtcttaatgatgtgaaagtaaaagaaaaaaatctcacatctttagtatagtggttttcttttttcttttttttttttttgagatggaatcttgctctgtcacccaggctggagtgcagtggcacgatctcagctcatgcaacctctgtctcctgggttccagggattctcctgcctcagcctcctgagtagctggaactacaggcacttgccactacacccagctatttttttttttttttaagtagagatggggtttcaccatgttggccaggctggtctcaaactcctgatctcaagtgatccacccgcctcggcttcccaaagtgctgggattacaggtgtgagccaccgtgcccagcctgtgtttttcaaagtgagattcccagatcaacgccatcagcctccctgggaacatgttagagatgtacatggccccctcttcagaccttctgactcaggaactctggtttctaacaaactagcgacacaattctgatgtgctacagtcagaattatagctttccaactgtgctttcagccctaatggacactggaatcatcgtgggagttaaacaaacaaacaaaccaaaaactactgacacccgggtcccacccccagaaattcctatttaattagtctagatggggccccagtattcatgagtacttttgaaaagctcaccagctgagtttattatgcagccaatgatgaggacactgctcaggccacatcctattatcaagtaaatcagtatttctgggagtgggacccaggcatcagtatatttccatgactcccctggataagtccaatgttcactcaaggttgaaagtcactgcttctgagcctctagcaatcctgaaattctatgttagtgactgacactatggaaacccacgtggctgcagtgtagagtaaggactcagggacacatgaagctgagctttaggaacccaccagtccctcttgcaatgctacctgtggctgctactccagtaaaaaatggcccagagattgggcaatcctgtgagggtcatcacgttgctgcatcatccgaccttcactgtttcatacttctgcatcctctgatactccattcactcattcggtcagcccgacattctggaattttttcatgtaccctccagggcataagacaaatttctgccttcatggaacttacattggattgttgaatctttacaaacatttatactgaattttatactgaatttgtactaaatttcagtatagtgtcagaagtccaactttaaccagagactgtagaaggagcttgttcataagcacgtgcatccattacacaagcggtgattccaatttcaggtgaaccggggccacctgcagatgtggatgactgtccccgaatcccaggccttcctggggcgccaggcatgagaggaccagaaggagccatggggctccctggaatgagaggcccctcaggaccaggtatgagccgcatgctgattgttcattattttcatgatatattgctgaaatgaaattctagatcttttattttgtagctttttatatggagcctaaactactgaggagaaagcatgtctttccctttgcaatttgtttctaccttgatccaaagtacatcaatcatgggctaactggatccacacatcccttctattattttattttattttattttatttttgagatggagtcttgctctgttgcccaggctggagtgcagtggcaccatcttggctcactgcaagctccgcctcccaggttcacgccattctcctgcctcagcctcccgagtagctgggactacaggcgcccaccaccacgctcagctaattttttgtatttttagtggagatggggtttcaccgagttagccaggatggtctccatctcctgacctcgtgatccgcctgcctcagcctcccaaagtgctgggattacaggcatgagccactgcacctggcccatcctttctatttttatgtggaactcctacttaaatctttcattcttggccagcttttggatgtagagttttcaaacctcttagcacaacatggtagatgctccatgaacagtcattaatagctgcctacttgattttgagttaaaaacaattgaattggggcttggtggagcggaaacagagcctgcaagaaggaagtaggagctgttagaggagggatggggaaaaatagggtcttgctgtacgttttggcagttactacatggttaatcactggagcattgttcagtaactgccggggtggcaggatccttattcaagtatttaagcgaaaccattcttttaaaaagtgttctccatttaaaaagtgttctccagccaggcgcagtggctcacgcctgtaatcccagcactgtgggaggccgaggtgggtggatcacctgaggtcaggagtttgagaccaacctggccaacatggtgagaccttgtctcttactaaaagtacaaaaattagcagggcttggtggcgggcacctgtaatcccagccacctgggaggctgagacaggagaatcgcttgaacggtggaggcagaggttgcagtgagctgcactccagtctgggcaacaagagcgaaactccatctcaaaaaaaaaaaaaaaagaaaaaagtgttctccgaatggtttgttttctttccacatatccccactgcattgggtaatttacaaagatattagggagcccagggctgggcatctagaagtcactgttctctttagatccattgatagtagctatgagtctagaaaactcatgggcaaattctttgaaaaggaggaaccaggatgttctctctcctttcaccccccctcactgccccactatgatttggactttttttggttcagggacacaggaattggaagcagaactgaattttgtaccacttgtttttcttgtggttccccaaaaccaagaagttaagtgcccaagagatgttcctctcaacaggagtcagactcgttcttaggtggtgaccaaaacagccctggagccttcctcaaattaatttgggttttcgttgtgtgtgtttattgcattgcatctgtgtttgtgcaccaggttaattgggtgttggttgtagcaactttttttaacggcccgtgagaactgggaattgggccagtctttatttaactcatctttcttgatactccttgcatgcataaagttctgtcagtcggtattactagtcatcaacctcattttaaaaccaagctgccttgtgtatatatttgcaatatccagagctgggtccctccaacttaaaaaaataacttccaacttgaagacgtgacctataactgggttctgcaaattcaattcagtaagtacttccagactccctctactctttgtaaagtatgctactaggtggtatgggtgagtaagatgagtaagatgtgttttccccctccagggtctcataatcccatgaaagaaatagccagcagaatataaataacttaaagtaatggtagattattacacaattcatgttaaaaaggagttgcaagttgggtgttgtggctcacgcctgtaatcccagcactctgggaggccaaggtgggcagatcacctgaggtcaggagtttgagactagcctggccaacatggtaaaaccccgtctctacttaaaatacaaaattagctgagcgtggtggcagatgcctgtaatcccagctacttaggaggctgaggcaggagaatcgcttgaacccaggaggcagaggttgcagtgagctgagatcgcaccactgcactctagcctgggcaacaagagtgaaactccgtctaaaacaaaacgaaacaaaacaaagagttgcaagtcaagggtattgggagaatgggatggtgagaggttaattccagtgtggagaactacaggactgctaggaccccagtaagagctggtatttgactagagccttaacgaaaggttgggctttgaggagccagaattgttcaacagggagatggcgggagcacagactgggctggttggcctaataaccaggcatctaggagttagcaacatccttgctactgtaactgtggtcctggtccaggaactagcagcaactttggtcccgccccagacctacagaatcagaatctgcattttaacaaggtccccaaaatagttgcatacatattcaaatttgagacgccctgttatatgaatgcactccttaaagattcagctaagagtagaacgtttcttagcaaggcagtcctagctgcaggttaaaatcacctggaggatcttgaaagaatattggtacctcggcctaatctcagaccaatagaatgtggaaggtggcagagcctgaatgttaacatttttcaatgccccccaggtgactgtagcaggcagccaaggttgaaatgcactgctccacctcaacatcaaaattgaggccagagggatggttggggtcacccactgtggtggctttaaaaaaataaccaaagaaagtaactaggaagagaaaaatatgtgaatgggtcaattctttacacttgaacatgatagttatctttgacatgaacaagaacaagattctctctccatagactatgagcttctgaaagatggtctagtgcttatgtggcccaggtgtgcttgcctgtaatctctaattcccctgacttagggtttcatgggctcatctgctgcacgtggccacaggagggccttccctgggttcctgtgccctctctttattggagccactgaccctgcctgctggaagtggggacactccaaggccacctctctaacacctacatgattatgatgttttttaaaaagtgccccgtcgttctggtgaagcatcgccttctcttcctatgttctcaccatgtggcccagcttccctggggctcctttttgtcctgtgcacccactcccaagcccttgctttcttctggggcccctcttctctgataggagcctctgggttcctgttacaaaggacctctcttctccgccatgtattcctcggccttgtctatgcctgctgggcacactggctgtattgctcatcccgtccagttactaaagagtgacaggtatattctaagggcctaatgccaaaccctggctgacctgggccatctgtaggccatgttgctcattctctagcatttcctgaaggtattttttcagcagggtgtgaggggccatatacaccactccagcctgggcaagaagagcgaaactccatctaaaacaaaacaaaacaaaacaaaagagttgcaagtcaagggtactgggagaggttaattccagtgtggagaactgcaggacagctaggaccccagcaagaggtggtatttgagcagagccttaaggaaaggttgggcttatataccaccaccacatataccaccctcaagattgggtgctgaaaagaaatggctgccactagaaagaacaatgttcacttaaaatgatgttgttggtatcttcctgttttcccttcagaatcttctcttttctgctcctctacctcctcctcccctccagcctcaagtagacaaaaaagataactactgagtactgggcttaattcctgggtgatgaaataatcatcagtacaacaaacctccatgacatgagtttacctatgtaacaaacttcacacgtacccctgaacctaaaataaaaggtaaaaaaaaaattaaaaaatcttttctttcattgctaagctgattttgtaaccatgtgctacagctgagacttacctaaaaatgaacaaacttctggctctttcctgcccaatatgggtggatgacagccacacgaagtgggtcgattagtccaccacaggaggcctaatgctcttctacacacagatctctttgatctacaacttttccttccagggcggccctcaaaggctgaagcttcctacagtgaactcaaaagtgttttccattttgttttgaactgttcctgcctaatggatgtacccacaccctgttagggttgtgtttctcttcaaggcaacacttgccctctcaggaggtcatccatctaacactggagggtttgttttgatgtttagttttattccttaaaactaattccaagtagggaacaagtccgtaaggtggaaagctctgaacatagagctcaggttaataagaagagccttccttcctgtttctcaggaaatgtcttccgcctgacaatttctctttgcctcaccctaaagggagtaaagcccacgtgataacgtctggtgtgaggactctttttcccagatctatagtgatctcaccatgagtctatacatcaggaggaatccctgctgctgcctgttcagtggaagggagaaactcctaacccataagcactaaggcagccctttctagaatatattgcatgttggaatcatcttgttgggtgagacagagaaaggaatgctctgagctcactgttggggccccatgttccttccaagataactgatactctcttggaaggtggtggagttccagattccaccaggagtgccaccccggggagaggtttctgcccagtcaccaggaagggcagggctcctctcacccagatggggaggcggggatgtttcctttctcacctactgaatggtaaccacatacagcatgcagtccaggacactctgaaataattcgtttctaatcctgggagcacaaaagcataacaggagcatatcggacactgggatgtctgcactgagtgtagctcaaccagcacagggcatggaggggagagactggctggtcgtagggatgtaagaagaaggggacactctcaggcaggcaatatgaggacgtgactttacaatcagtggggcgtgtggaaccgagggcaggcaagtgagacatctacctcattacctgaacacttcaatcccctgcttcagctttggagccagatgatctttgctgcgaccactcaaccctgttgctgcagcatagctgtagataacacgtaaatgaatgcctgtgttccactgtaactggggttactaaaatgggcagtaaatggcccacaggctgtaatttgccaaccactgttatagagaccgtaagaagcttgagggcaggatattgtcttattcagtgtgatatccatacacaggcctgggtcatggagggtgtttggtaaacatttggtgaatgaacacgtgactcctggatgtagcctactgtgtggagcggtttctcaacctcagtgctgctgacatttggggcccgatcgttctttatcctggagggctgtttggtggattctaggatgttaagcagcatctcttgcccctatcctgctagatgccagtaatgacctcttcctccatgtgaggacccaaaatgcctccagacattgccaagtgtctgctggggtgaggggtggggtggggcggtgcagaaccacctaatgttgaagaccatttatgtagggaaggatgtggtaggagatgggagatgtacctttagcctatgggggaggcatttggtgaaggggaagaaaaaaactttattacaaaagaaaaaaaaaggtaacttaaaactaaacacacttttaaaagacacaattgcctgtatatttttccagttttatttctgcacgatcatcctaggcatacttgttggcaaactgttcttaacataaccttacttctatgtcattgcgtattttcctacaatattatctgtagtagctgaggaatattgccttatctgattgtgccataatttatttaaccactaccttcaccaattattgattggtttgctgccagctgctctgctagaaagaagttaatccaacaaggccctgctttttggagccacaggctagcagaaaatgaagacattgagcaagtcagtttggacatgttgagtgttaataaggggtaatgtgggaatttctaacaggggagctgaacctgggggtagggagggggcgtcacaaggaacatttaaggctttggttctcgagcttcatgaaccatcagaatccctgaggagcttgttaaaacacagctcgctgaggtcccccccagacctgatttgttaggtaaggagagggctctgagagtctttatttctaacatattcccaggtgctgccgctgctgctgctggtccagtaactactctgatttaaggagtttccactttctcactacgataagcaactggtaatgatatcttacttatacgcatccctgattatcatgaagaaatagtgtaatggataagaacagaggttctggaaataagggctgggtgtggtggctcacacctgtaatcccagcactatgggaggctgaggtaggcagataacctgaggtcagcagtttgagaccagcctggccaacatggtgaaaccctgtctctactaaaaatacaaaaaaattagctgggcttggtggcgtgcacctgtagtcccagctactcaggaggctgaggcaggagaatcacttgaacctgagaggcggaggttgcagtgagctgaggtcatgccattgcactccagcatggccaacagagaaagactccatctcagaaaaaaaaaaaaaaaaaaaaaagccaggcatggtggcccgtgcctgtagtcccagctactcgggaggcagtacctttagcccttgcaggaggcaggagaatctcttgaactgggaggtggaggctgcagtgagccgagattgtgccactccactccagccagggtgatacagcgagactccatctggaaaaacaaacaaaacacaaaagaaataaaagagcagagattctggaagtagatgacatatgttcataactctggctctaccacataagccatgactcagtttcctgatctgtaagaagggctgattgtgaggattatgtggattcactaacataaaaagcacttagaacacagcctgacacagaataaacagtacttgtgtttgctattattgttgtttctttaaactaaattccctgagtagaatttctggttttaagaataggcagaaatataggattttcaaaatatgccgccaaggtcatcaccggaaagagttttaaagttaaatcatctagagcactggttctcaacgtgtggttcctgggactggcagcatcagcatcacctggggacttctagaaatgcagattctcatgccccaccccgccctaccaaggcagatgctgatttctaccaaagtgtgagccagtgttccagaatgtcattggggttctgttctcaggagcagtaggaccgtgtcattgcactgtttagccctgtgtttcctattgatgttgctcaggtgggttggaggaggaagattgagtccagggttgctctaggcaagttagctactctactacttgtggacgcacagtcggggcctcacctggggccgcagaggggcagggaggggcctgcgtgggaaatcttcgattcttgctagcttgcaacatcaagtcaaacctccttaaacctccatgcatccttttcatgacagggttgctgctttaagggtagagggtttcggtcagcgtctgtgttaacacactcatttaatggttatcaggcaaggctggtccctcagtagggtgggggagggaggctccatgaattcctgggttgactggcatcctcagctttatcatcatcccccagtcactggagggtgaaggcaagaagcaacagtgaaagccacttaagcaagcccctttgatttaatgtttgattttaggctacgtgttggtctgctcgggccgccacaacaaagtatcactgacacagtggcttaaacaacagacaatttttcacagttcgggatgcagaagtccaagatcaaggagccacaacagggctggtttctcccaaggcctccctccgtggcttgcggatgccaccatcttcctgtgtcctcacgtggcctctcctctgtgccattccagggacatgcatccctggggtccgtttctgtgtccaaattttctccttgcataaggaggccagtcagcctggattagggcccagcctaagaggctcattttaacagaatcacctccttaaaggtcttatctccaaatacagtcacattctgagatacggggactaggacttcaacatatgaaatttgggggtacacaaatcagcccataccaggctactctgtggcagagagagagagacagagagagaaagagagaaagagaatagaaaacaagtagagactggaaacctggagaaggctagtaattcaggaaattaggtataatagcaataaactccctcaaagacaatgattgtgtctgctcccctgaccgaagggagatggtggctaattatttgaggccttgacaaaaaagtaactgcatacttaaagaaccccttaaggattaacgcaattgctgccaagtcccccaggttatatccagagctctgcagcttgtcaggcgcagggtctggtggttgatggcctctgcacttggctcccttgggcctaagtttcctctccacatgtgactgctctgtgacttttatgagccccagtctcttcactggtataactggcatgtatgagtacctagtcatatggctgctgagaagactgaattggacaatccacgtaaagggattagcatggtacctagcacattgtaaacactcagtaaaaagctattttaaaaaattgctgcacctatcatgctccagatttaacgtgaccccaaatgaaaccgattaagtttcattcatttctccatctaggctttgaaacaatcattattaaggaaaatatttattataaatgccatacatgttcagtagtttttttttttttttttgaagtcaaatatatgaagactatgaagaaaatgtgaaaacctgtctctcaacacctccctggtctggcttcaaatcctggcctagccctttatgggatcactgactttaattaagcaaattatttgacctctcggggccccagttacgccaactgcaagtggagatagtaaaatcccaacttcatgtcattgcaaagactaaatgagctgatgcattcagtcaaagtgggaaggaagcctggggctggcacacggctggcatacggtataagcacggtaaatgctagcaggtgtcatggttgctttcaccaccagcatcataaacttttgtgcagggtgcaaaggagagcctgggctggatggcaggaggggtgtggatggcgtccctgggtctcctgggcctcccggacgtaaaggtgacacaggagaagacggctaccctggaggaccaggtagagtttcagtcactcctcttttctctgacactgtaaaccttagagttgtatacaaaatctctgatctctcaagtggctttccaaactggatcctattcagatcatttgccttagatgctgactcaccaggtatcagagacagaaacaatgagaacagagtgggatgcatctcttatgttctaactgatgttaaaccatcataaaacctagacaaggccctgcatcctattcagtattttcccaaactgctatacatcatcatcaaagtcttggccatttctgcagttcacttttcaaggtcatgaagggacggtcagcctggtggctgtgggatcacccttaagaggctgtgatgaagacctcagggacggtgtgtgtgttctcaccctctccaagtggccaaatcgcctggtttcctgagttcacttcatcttatcatatagccattagtacactgatgtagaaaacagggctctttcttaaaagaaaaaaaatgggaagtggtgttgggaaaggggacataggactcttcagaatagaagtgtgaaacaatgcaccatgtagctcgttaggcgcatggatccaaagagcctgagacacaatcccatctccagagagtccctggccagggatgcaaactcctgtaccaggttagtagtgagtagaaacgaatgaggagggctgggtgaggtctgtagcaaaatggagctttggctaaaagctgcagcgcagctccagccaattatagtctacagaaatgtgggcctacactctacactctcttcgttcaaaatatcaacttgtaaaatccttacaggtcaaaacacacgagcaggcctgattcagtccacaggctaccactttgtcgtctctggttgacagtgtagatggggagagcctgccagtcttgcagaaccaagggtagaacacaaaaaataccttttggtttcaatgtctaacttcaccttttgctcttggcaattagaaacagctcctggccttctgcaatagttcagccccttagaggtgccgaaggatacagaccctgctcacgttctctagaactgttgatttcccatctgccaacaagaatgctagaacaaggccttccttccatttccctctcttctcgaagaggagagccaaacttgtagatgtggatcccaagcctttggctttctcagaatggaactgataatatgctggaaccagggaagaggtctgggaggtgtaagaaagaccgactttggggagcacttgctcagcagttcagtctggggagtccacacttggggtgtgtcattacactgtccttgttcttttcttcccagcgtatttcataacttaactttttgttatgcttattgtttcttatttctctctcttcctcaagtgtaatgcaagctctatgagggcagggattttcctctgttttttgtctttatgctaatgtagcccaggcatctaggagttgcttggaacaaatacttgatgaatgagttgttctatgtactgcagctgtgtagctgtgtacgttccagaaggcgaggaggggctgagtcatgctcccctctgctccctgagtgcttagcacagtgccagaacagaggtgcttaacatatttgttaaaccaaaccccctaacctgccttcaatttttttcctttgttcctccagggcctcctggtcccattggggatcctgggcccaaagggtttggccctggatacctcggtggcttcctcctggttctccacagtcagacggaccaggagcccacctgccccctgggcatgcccaggctctggactgggtatagtctgttatacctggaagggcaagagaaagctcacaatcaagaccttggtatggatacaggatcgcccatctccattgcctgaagagtaaaatttggggttaattttactgattcatcagcaccttaaatgatcactaaccttatatgggattattcttacttttaaaacaaaaacactagcatggtcattctcagctaatcctttaaacttatgatcctatgaagtgtcaaagaagctcattctggctataattattatctggctataataagtatattattattatctggctaataataagtatattattagttttataaaaatgattcttcctcagtaagttaaatgtaactctgttatgaaatgtactttttgcttccaaatgtaaattaaccagaatgtggtcagttcctgtacttacatgtaaaatggtgcagccacagcacgctgatggttgtgttacggcacttgccagcatcaactccctaccctactccaatttaaattacagaactttattttgagggtcatcttttggtgctccttgtcacttctccgctctccgctcttcccctcccctaccttcccctcccctcccctcttctcttctctcttctcttctcttttctcttctcttctcttttcctctttttttttttttgagatggagtcttgctctgttgcccaggctggagtgcagtggcacaaccttggctcactgcaacctccacctccagggttcgagcgattctcctgcctcagcctcctgagtagctgagactacagacttgtgccaccatgcctggataatttttgtatttttagtagagctggggtcttgcggccaggtaggtctcgaatatctgacctcaggtgatcttcccgccttggcctcccatagtgctgggattacaggtgtgagccaccgtgcccagcccttgccaattttcaatagtagatttgcaagctgcgggactgatttcaagtcaaaggcttaagtacctggctgccgggaaacactgtctttccaagaaaatcatggttagaatggaaggtgcaggaaggatatgctgacggggacagttgacggtgaggtgcttgccattgctctcactaggcagtgaccccagctgttaaaaagggtagtcaaagagtgcaagcctgggctggcaactacttgtacatcccctgcatttctcccttgggtttggccatggcctttcccatcacaaggggctagtttctttgagcacaggagaaaggaggaagtgatgtttaatatcctgaatctgtttccttctctccttctctccctctgccatcaatttctttcctgcctggtctttgtaccatcatccgtcttgcttctcccaccttggtctaaccagagcacacatcttaaaactctgcagaactcttgggataaagtccaaactccttaacgagattgacaaaggccacatccaatggtctgatttatcactggacactcctgagacagacagtgcagacaccctctcctcatagtccctgcactgaacatgtctgagttctctgagctccacgatcccttatctccaaccccctctgacggtatatctcttttgagtagtcactaccaccatctccaagcctggctaaatcctcttcatatttcaagtcctaacttaaaatcacatattccagttatccttccttgaggtcccggatccccacacttctcattcttagggcttgttgtgctgtattttcattgcttgtttgctcatccagttccctgctaggccatgagcttcctgaacacagagatgtgcttggtgcccacctccagcacctggccccctgcttggctcgagtgagggatgaggggatgagggctggcccacaggaccagggaggtgtcagaaatggcttcctcaccacagaagcaggctttggcgagggcctccagatttcagaacacgtatctgcaaaggccagatggaggaaggaagggtctgggaacacctacatggggtgcttggacaccagctgtctcttcttcccttcccaaggtctggcagggtcttgccttcccgtatttagcacgctgccctttgcctactgcaacatccaccaggtgtgccactatgcccagagaaacgacagatcctactggctggccagcgctgcgcccctccccatgatgccactctctgaagaggcgatccgcccctatgtcagccgctgtgcggtatgcgaggccccggcccaggcggtggcggtgcacagccaggaccagtccatccccccatgtccgcagacctggaggagcctctggatcgggtattcattcctgatggtgagtcccgtgcccttgaaaaccctggctcattcaccatttcctaacaccttctcccgccatttctctctggattggacagtaattctgagcactctgcgcttaggacataaggttacggggactgttgcaaaccatagcctgttgggatgcagggccattatcttttaaaaacacttgtgattgattttgatcacattggtagaatttagaagatgagtttgcttcagccatcggtgaaactggagccaatttgtgtgcatacttaccatgctgagtacgactccttttcagcgcttgtattttgttctttatggaataatctaaggaaaaatgttaagatcagacccaaacctgggtgtgtccctgattgggtctggggttgtctgtgtgtgtctgagccctaattctctcttgttttctgggtagcacacaggagctggggaccaaggaggagggcaggcccttatgtcacctggcagctgcctggaagatttcagagcagcaccattccttgaatgccagggccggcagggaacttgccactttttcgcaaataagtatagcttctggctcacaacggtgaaagcagacttgcagttttcctctgctccagcaccagacaccttaaaagaaagccaggcccaacgccagaaaatcagccggtgccaggtctgcgtgaagtatagctagagaatgcgaaattcaccaacacgtggccaagagaaacttcctagggggctaagacttcctagactgtgctaagagatgtcatggtgctcattttggactccctttcagtggttccttctgttttgtcgtggttattcccagagtcctctggttccttacacattaagcaaatgctgcacagatggatttgtttggacctcccaatctagggagcctagatactcttattttactgaggatgatcgaagaactggctttacttaaaaatatgctaattctcagaaaggcaagtagatgataaaggccagattacaaattacattactgaaaacttcattcttgggttaacagtatctcaaacaattgaagtcaattactctataatacagtgggcttctggatggattttataggaaaaaataaacaggtcaatgaatgaaactagaaagcagagattttcaacatttcaaaatgatttcctctgtaatctatttttccatatactttaaataatggtaaaaccatgacgcaaagagagatttttttttaaagaagaaaaaaaaaaattcacactgccagcgttaacagttcctttcaaaggagaatgaatcatgatggcaggaaggcccacagtcgccgtattccagagatgcgacattagcataaacacatcacagatgaatataaaacattatgttctcttctgcatttttcagagaatagaaatgcctactttggcaacccttttgaaaagtagcaattatggaaaaaaaatattcaataagagattaggagcctaaaagctattagtgaatattaaggtagttattcacaaaaattgactccccattgcagtgaacttccagacagactgcttttccccagtcggggtccggcgtgtcacaggtgcgtgcgtgctaatgggactgacgctacatggggctcactcaggcaggcacgcgcttcatacaaagcatctcactcccctccccaggagagcctgcacagcttcttgcactcacaacggacactttgctccacacacataatggcagctcacacagggacgtgacagagctatcattatgcacttgggagaaaattaagggccgatttaattaaacttaggtaagaagattcatttaagtcagggttaccccatcaggaggacatggcactatctttaaacgaaacaaagacaatttataatttgaattttatgctcccgtggttggctgttacaggagcatcccattttgccaattttaaagacattcttatatttcatatcagtcttgtaccaaggcaacagtttgacatttggcattagtattttctaaaaaagtttagaatgtgtgtcaatttataatgattatttttttctgtaaagcaaaagatccctttttctgttttgctaggaatttggtgatctaatcctaaatttaaaagatttgttggaaaaaatttttaggaaactcaccttcctcatctaaaagaaaaaggcattttagagaaaactaaagaaatttctcatgagcgtgacactcattttagtgctttgtttccgtgcacttaaaaataattgagaagaaaaactcaattaaaattttgtttataagaaatgttttccttgccaaaccttgatttgtaatgagctcttatatgcagaacacatttcaaatgagttttgctatgggctgcccccagggtggcaatttattttaagagtattttctggtaaaaagaaaaatgtgtattttaagatgaaatattttcttgatgtagcagaatatttcctagttcatttgacccatttgatattttttaaaccatgctctggcatgttgaatatttttgtgcacctaaaacttaagccaatttcaatcttatttgtgattacctttctccttcccaaaaagctttatctattaccaaaagtcaaccctcctaaaagttcaacctgttcatcttgaacttggcctgagaacattttctgggaagaggtaagggtgacaaatggaacatcagaaacgtatcttgcttgctaattattttaaacactttaatgttggtattagaatattatcttcataagttaataaataagtaaaaaaaaaaaacccacacaaagacaggctaaattatgtagacagtttactccacagtgagcttgggaaggtatcagactgttcaaaatgttagtattacaagagctgtctctaaatgcagcattaacactgccctctaattttacaaaagtattttaaaggatcaaaagggcggaaaaataacttcttggaatagaagatcctgttaccttaaaccattattttcttcacctggttatatatcaatgtgccttcaattaccctttctctgtggaggtgatgaacaaagcttttaagttgttctcctaacccattattggagatgatccttatcaaacccttctctccctgcctccccaccaaccttgtagactggaacgtgcctagattgccctaatgggaactgttctgttctgtgcccgtgctggaaatctgggatgcttccttctgggttctgattctcagtgagtggagcccattcatccaggcaggtttccatgctatgagtggccctttcgttctgctctcacactccccacattgaaagctgagtcatcgctgctttggatggctacctcctctttagccccgtgcccgtctcacacagcctttgttttccacctccacccttgcagtaggcatctcccagttggtgccttagtttcaaatcccagttgccatctaagatccacccaaacttgattttgtcaccctctggattagaatccttctgtgactccgctgcccatgaagtccaaatgacttcctatggggtgaaaggtccagtggggactgttcgagggttccctctaggagtatttcctgtcatgatgaactgtgtgcagctctgcagacactcccagcacctcttcgactttgctcctgcttcaccagtgatgtcctccctggggtcagtttaccctgcgtgggaggtgaattccctgggggaaacttaggctcccttctgctgctcttgtgcagtgcacggggctgtcctcattttctccgttccccattgcttctttaatgtctcagtgcacttccttcattccattgccaaaatgcaagccccttgagggcagggaccatgcttgactcgtttttgtatgcctaatgcctagcacagagttgaacacattactgccaattcatttttttcaatgacaattccataaacatcattaggcattaggtgttcagctctgcatataaggtcttcatcagcaagacggttacaagtataaaccatttcctatttcagaatattttaatattcaacatatttgtatacccacattctcttgttacaattattgccagaaagccaattgataagctttcaaaatgggcttatcacacccctccaaaaatagatttttgttttttctataaacagaaatttcagaaatgagatttgagagatccgactgagaagacccttcagtaaaatgtgacatgacttaccttatgctgtaatctgtattccctcaggatttaagagcttcctagcataaaatctttgctaaacgtttgtgtacatgttattggtgctccgaaaaatagtcaatggaatggtgcactacaattgggctttatcatcttattttgaacctcgtgtagattacagtaaagcaaaccattcagtgtgttccaggaaattatattagatctgtgtttctatcagctcactggaataatctgataattgttacttttacttggtatggctgcaagaatagtggaaagaagaggacttgagagttggtcgaacccaggtttgaaatctggcttagtcatttttcagctgttatcctgggtgagttttgccaactttcttagcttcatttccctcattaatacggtgggacataacagctactcttgcattgaaaattaagttagattacctgtctagcatacccatcatcatacacttactatggtcacattttgtatttaaaataaactaatacgaaaaatatttctttttttttacacagaattatgattctcacagggtatataaattactgattagaattatttatatgtggccaattcttaatgtcattgggaatgctgtttcatttcaatcctcaaagttactgtagcacagaaaatatcacaatttcctgcagggacattatcagtaagttctgcagggaacaaacaattgacattaaaaatcagtactctgcaattgtcactgttatcatctgctagaaactctgcataatgcattttaaaccaccaaggctggctgccacatccatgtgaaatgcttgaattttatggtgcttaaatatttaatgattcatgggaaaaatgtgaaatgtgtctaataaattgcatccctttctctaacctctggttgtaaagttaaagactttcagcatgtaacttttgcaagatgcctggtctgccattggcacttaaatatttgttgtattacgatttataatatggttcattatatataaaattctgtgatgacttccaaaaacaactgtgttttatctggtgcatttattttctttcaagccaatgcgggtttacttttttcttctagcttacattgtaatgtggctcacacttgtggaagtgtgaactgcagaagggaagagtgtaggctggaaaggatgagattcagaggctcttggaaacactgttctatgcacagtgatggcgcgcagaagagaaatgaaagcaggcctcagggggaaggtctgtatcaaccccacgggagctgcttgggcagtggtcagtgggcatggggcttacaccctcttggcctcagctgtctcattagttgagtgagaataagaccatttgcttcacagcattgttgggaggattcaaggtgtgaaagttaactacaaagagatttatgaaaccaaagatattgttacttttaaccactgtgacttgaagtcaggagttagttaggtattgattacatttctctttatagccaaacaacatgggggtaggtggagtgcagatattcaataactgctttgtggcctttttttttttttttttttttttgagacagggtcttgcctgttgcccaggctggagttcagtggtacaatcatggctcactggagccttgaactcgcaggctcgaatgatcctcctgcctcaccctccccagtaggtgggctacaagcatgtgctactgtgcctggttaatttttaatttttatagaagcagggtcctgctctgctgcccaggctcgtcttaaactcttggcttcaaatcatcctcctgcctcagccttccaaagcattgggattacaggcatgagccactgcacccagccttggacttacttttaagtaggaaggaacttcattggtatttgggccaaccttttacctgatagagaaataagggtactcaactaacaaacattccctgaccgtctactatgtcacagcagcagtattggctctgctatatatgcttcctctcaaccctacagctgtcctattttgcagacaaggaaactgagctttagagagaataactactttaaggtcatacagtcaccatctagtagaatccaaaccctcgtctgtctgttctaaagataatacttttatcctttactccattacctcccagcggctttccccattcgtgaattggttagaaaatagagggtctcacatagaggtgtcctggattgctcctgtcactgcaaagccccttgttttacgggttctaaggtagcccatccagctcagcttggagactgtctcaagctgttctggagggagggggtgaggaacccatgaggacagagctattttgggggaatcccacaggcctttatctcagggtcaactgaaaaccagccatgtccaaggtgggcggatcatgaggtcaggagatcaagaccatcctggctaacatgtgaaaccccatctctactaaaaatacaaaaaattagctgggccaggtggtgggcacctgtagtcccagctacttgggaggctgaggcaggagaatggcatcaacctgggaggtggagtttgcagtgagctaagatcgtaccactgcactccagcctgggcaacagagcgagactctgtctcaaaaaaaaaaaagaaaaaagaaaagaaatgaaaaccagccgtgtctcctgtattagtccattttcatgctgctgataaattttcatacctgagactgggcaatttacaaaagaaagaggtttattggacttacaattccacgtgcctggggaggcctcacaatcatggcgaaggtgaaaggcacgtctcacatggtggctgacaagagaagagagcttgtgcagggaagctccccttttcaaaaccatcagatctcgtgagacatattcactatcacaagaacagcatgggaaagacgttcccccatgattccatgagacctcccaccgagtcccctcccatgacacgtgggaattcaagatgagatttgggtggggacacagccaaaccatattacctctg

SEQ ID NO: 748 - DNA, 264622 bp, Homo sapiens
atattcctcttggtctttagaactggaagagatcgtctccatcgctgaactcccttaacataatattcatatattgatgactactatacgactgaaaatcacagcagaaaggaccaacctgggcatgttacaactttaaagaaagaagttgatatttcaatcagaccttgatttgagtgcagctaaaggcattttacctatgctctctgcagaaggaacaatagaaatgttttctctccttaccctcctcccaacccaaataagtatccccctaggcttttgactttaagtatgcttgattgtattagaccttttcctgaaagctcatttggagggggcaaagtgtgaagaaaacataaggatctgactacttcgggatatatgttttttcctagatatattggctgatggtgagatttgtatctttctagacatttcgctaacacgatgcaagtacatgtagataataacttatcattaagcatcctatcttctaaggaacataatgaccaccattgtctgagaaagcaaattcctagagagttaggaactatgtttaaataaatctttgcatgctgtgcgtggcctagcacagccccttagatagttaggcgcctaacagccaaagacatggatgttctgagatcctagattctattttatgcagataaattgtgcaaatatttcacctgaatgaagatcattactcctttaaagtaaatttaatggaagctcattctttaacatggattttaacatttagttttcctttactttatatagatgtgctttgtaaactcaggaaaagaaagagcccaaaagcccctaaatgacccaatctttaaatgcttgccaatattattggcagcttaattctcacagtaaagagactttctcatagcaaaacacaacatagttcctgccaatctatttttaatagctattttcgttaatattagtcaaacatggcacagagaatttaaatgtttaaaacaatccaaagggtgaaaaacacacaaactcatgaggataaactggaattgagtgtagaatacgagaaccagcccgtatagataagaatcccgtgcaaagagtgtaaaagaaaaacaaaacaacccttcagaaaagtcatcttctgataacttattctgtgactgtctttatatttgtcattttccccaaaactgaaaaaaagtagctttacaatgtcaaagatattttgcataagtaaacaacaagtgaaggaagtggctgtgtacttaaataagtcaaaaaataaagtattatctgtggaactcaaggtcaattttagacttaccatggtcaatcatactgacatagcaggtgacataaaacaatgagacagagtctaaaactcatacaccaaagcagtgcttaattttggagactcatttcaatacttgaaagaattgcaagcattaaagtggtttttaaaggtattaagtgacaggatgcagtgtttgtgaagtcttcagctatctggaatgatctgtagtgtttttcccaaaagtacactgaataaaatcagccagagtctaaaaataaaagttttgcttgagggtattctgcccatgcatgacacttttacaagtggcaagattcctggatgaattgttaactaatcaaatcttggcattttcaattaatgtagttattgagcctcaaggtaatacataactaaacttgtatattgaaggaataagatggagaagtacacagagtcttagatcaatatctttgcttacgaagtccagaatttacttacataggaactgatattgagttaaggggtcacaagatgttggtattcaagttttctggcatcttcctctctttacaagaaaaatagcttcactctggtattttcttaaagacatcatatgccaagataaaataatccattttttcataaacacattgggtgatttattaggttgaattacgtatggccctataatagtatttaaaaatatttaaaatattaaaaagcagagccaatcagttaaaatgatcaaaacccacaagataaatatttggaatatatattcatctctcatctatatagggaatggctttgggtatcattaagaatttttaaaaaaaatacagcagtgaaatagtactcaacaattgaacaacttcgtattcaaactcaacagtttttatttctgccagcttaagtagctagtgaaactggaaaactgcagcatctttgattatttgggtcactccatctttgtgaaattatcctagtaattccactggagatttcaatactttctgggacccattaaacttttcttgaccaaaagtcttcagaaatttctttacctgcagtccctagttgatttgatagatgacatctaaacagcctatgaaatgttaactttgatttttttttctattataacagctttatcttttaactttctggtgatgcagaaacgagtaacacgacacatcagacagaaattgaacatcacctagtggtatcagttcaattcaggtagttaaagaatccagatgttgtcacctggtactgtcaaacgactctaagcatgtacttaagtttcatttccatagcatctgcggcactttgaagttccactccttgtgctctcctcccactctcaaactagtgtgccaattcaagttcttgaagaccagggaaaattatgtttcttctgccgtggagattgatgctagtcatcttaagtcgtctggggaagaggctcagaaatgtgtgcatcttgtgtcttccacttttattttcccaacccgttacgaagttttggaagatatcttggtcccaaaaacactgacttgacactgtgctattcctctcaagaatctcattaactcccattagaaaggggagtggtgtggactccgtctcgtggtgaaactctctgcaaccccctaacataaatactagagatggggatggttagagggtcaaaggagggggacggaaaagggtcgtgagaagagactcaccgctgctgccagttcctcggtcaggcacaacgtaaccaggagcagccacaacctgaaatgggagggagggtgagtaatgggctctctaggcttcggggtcgtgcgtctgcctgtcgccccccgaacccttttggatgcctgctcccaatttctctgcagtgacagaagtaccagtatagtcccggcctggcaaagtaacccgaagtaagaaagaggaggggagctcggggcagcaacagctcacccagggtgcatgcttgcggctcctccggagctgggtcccgggagactgctaagcggctccgcggcccgtgctcatctgggctctgctgatgcttggaggctgtttccttactcagaacagagtaggtggacgaagtggcccagtttggaagaaactaaacactgcttctagataagaagtgctccaaagggaaacaggctcagcggtgcccgttacaacttgcagcactcaggagatagttccatgcagcaggagaggaaagaatggaggggaaaggggcggggctgtctgctgtcaatcatcccccctaccttgggcagccggtagtctttctcactttcaggcacctttccacacaacagccctaagtatctccacagcttcacacacagccccttagagacctatacgctaagacctaagcaactgtgcatcatatactttcaactttactgttaggttacacataaagagacataggcatactattcccacataagacagatgggcccgaaagtgcccttgcacacatgcccaaatgcatacaacactgattcaaattgatagtacactaggctattgggaaggggagacagtttctggagttgtaaatccactctgagctaagcagaacctaaggatgagtgggccctcgtgaaatagatccaaaaccttgaaagactctaaagtggttaattctaggaagatagaaatgttgtgaagaattcttcatcaaattcttgaagattctccaaggagtccgcagaaagtattttctagttcttttgttactttaaaaaaaatctatatatcagaattatcaaaggaacattcaagtctttatatgggagatatcgattcagctgccatcaactctatttaaatatttccaattaagtgtttatattaattctaagaaacactgcactaaatttatttaattccctgccctaaatctttctgaaacacaactacaatgagagtcaataccttttacattagctcaatataggaggcattaattataggattcaatgcagctaaacagagatatagctgtattataataacataataccatagaataattaccaatacctgctgaatgctcccagatcttatacgtatataacacacataaagtattcacgcacatatacttattttcttacttgtttataagcatatactttatttattcccaatattttcacatcttctgcttgtatgtagaaactctctgttctgtgagcagctggaaggtaaagaagaccagcagcccagggagcaccgaccaaaatttgtttctaatgagtaacaataaaaagcacggcccctctgagatccatccgctaaaaaaatagtcccagtttagatctatttgtaattggctttggtacgcacaccaatgagattggaactgagcctagaaaagtagtatcaacggaaggtgcaaatgaacgaatagaaaagcttcccggttggactcatggtgctcagtcaactagtctggaagtttccctcccccaaataactgagcgtcactccctcgcaggttgccggtgcagtctaaaactgtggcggagtgatactcaaattcccttgtgctggtgaggaggggggccttgcacggggaagagagggaggaaagtagatctgtaggaattgagtgaagaaaaagtttgcaagtctggacagaagggaaaagttctcctgagagaccggctttggggaggggaggggggaaggaagagtagctccttcttcttcttcttttttttttcttccactcttaaaaagcttctttctcttcacccaagcctcactgtccctctccggctctagctctctccatataaaccctcaagattatgtcaattggttagagccagccgggaatttcgtgcgggtgctgaaggagctgcgggagccggagaagaatgaaactgcgtggagtcagcctggctgccggcttgttcttactggccctgagtctttgggggcagcctgcagaggctgcggtaagtccttcctcccctcccccgcgcccatcaccgctctttcacgctgaaattaccttttttttggggggggggtccctttatcttccttttggcgttgactagggaattcaaatttgctttctcatgtttaggaagaaacgttatttgcaacaccggtaactcaagccttctgaagtccaacggagaggtttaagtgcttaaaaatagggctgcttgcttccctgcagctagctcctccgggggcaagagcaaagtcagaagtgggggacgctaattaaaggctcactaggctgtggtgggtatttaaaacttttcctcccctccctccaccgtcgggtgtttccctgcctggcgactaaccttttcactacttgtacccagcccactctttgaattttgtctgtagtttaatattttggctcttcgaaaatccagcttccatcaaagtgtttttagcgcctcagtgaagttcgtcccctttgctctttccttaagcaacaggaacctacccccacctcaggtcattcaagccactgacctccttttcccttttgacatccttgttacaaatgaaatgctaaggcaacataccaagaagagtgaggtaaagtctcaggcttcaggtcttttgcgtctttttgttgttgttgttttttctaaattatgggtttttttgtttgtttacttttttttaaacctaccaaggcatctgaacaaattgagaatttgcccatcacctattcaaaggaaaatactcctttttcaaaggagaatcagtgttccagtttaaaggaaagtgggggaggaggtacatgtgaaatagcagcaaaaagctccattcagttttaggaatgtagaattcaaacctcagtatatctcttagaagggtatctgggtagtcccacccactgtcctattggggatgagggccagatgttaaaaaaatgaatggctttgtgagagaaaatgttctccagcctgaagcccatcatctttaatttcatataacctctgaagaataagtgtgtgacaaattatttaaatttatttgagtgatcattatggatagttttaaaaactgtttaatatgagatcatggcttaggccttcacatggttgagtgaccgtcaattctttgtaagcagctgctatgttacagctcatctgggtccacttttaagttagctgtctagcttccctatagcacttagcatgcctcaaatcacatgtcctctttctatccttctgaaggtgtgtacccggtgtatgaaaactaactttcatattactctgagcacaacataattataatagcaaatttgctgaaaaaccatgcatatcaaatatttttactatgcatgccataattttcttccatcaaagtagacaaatgatttaaaaatgcttttttgatgcagagcatcttaatgggggtaaggtttagccagtcaatagggctacagacttggataaaactgcaattgtgctgttgaaaatagttcattttaaaaacatcttcttggtgccctctgtttctggcatttggcccagggacaaagattttgtagatgtttgattaaatatatatatgttttttgatgttacttttaacaaatttgcaccagatgacaactatacaggtatgtatagcaacactacacatcaattaatattaaatcaatttatgttaacaatgaggtttctttttattgacaaaacttgagagcaagcttgttttcttggattcttaaactaatgagtattcatgaagtcattacagctctttcccttttcctcctatataatttttaaagaacattttatatccccttttcctatcattaggatattgtgcctctattaaaaccaagggtttgtttttcctggttcatacataaatattttaataggctcaaaaatatgaatgatatcggctctgcatacttgtgctggagatatcggtgaccatttctagagtaaaactggttggtggtagggctagtctttgactggagtagtttagtattggggtttttatatcaaaaaagtgttgctatttaaagtgctttactcttttataggtaaatgatttctttatctctgaaatcatgccaaattggtacatcacaaatatgtggaagatcttttttttaggtagagcattcattaggtggaataaagtaacctctatgccaaaaggttagtaataagagaagacagttttaagttggaaatataatttttagtgatggaaataacatttttatgtgaaggtaattatacctgtactgattcactgtcagtgggatatgcacttagatttgtggatgtgggtagtatgtaaaattatgttagttttattttacatagttagtaagttgttttctgtgcagtagattggatatttttgtctactttaaacgtactatcttccttgtgaccagcggcacgaatttatcaagggtaggagtgttgtttgtagccatgaaacacttcatcctctatgaagtatattgctccataggaaaaacttgtcatcattgtcatcattattaatgtagataacataatgagtgtttactatgtgccaggcactgtgctaatatgataatacatattatcatatttaatcttcagaacagacttatgagacatataccgttattatcctcactttacagatgagaaaactacaaattacagacgttgaatacattcccagaaatccagtcatgtaggcagtaacttgtgaagctggaaaatttgaatccaggcagtttgactctagaatctttgcccttaatgactgtcctatactgcctactttgtatgtggtctatagagatttactggtgtgtaaagtatttggatctctgccactttttttggacacaggaggtgaaatggaaatgataatgggggttacatgtcttcctgctgatgttaggagaagcagcatggtgtaatggaaatagctttgggcctagaataaaaagatcagagtttgacctctgtatctgtatctagagtgagattatttaaaagcaatctaaaagcaaatgctgttgaaggttttatgattttatgtaatcacaatatgtaaacatttcaacttatataactactataatttgtgacagatgatttgttttgaaggaagatttgccttatgattatttaattactcagttactgcattaattttaagtccaccaaacttttcaggagcatgtctattgtgaaacaaccgggtatgtgtgtatggtaacacactttacttaacatgcttaatttagttttgttctttttttgtactaatttgcctacctatcatatccaattttattcacaaactatatagatatatatctttagtcttatgcatatatctatatatgtatctgtcccatggcagtgtaagagtttgtattttttcatgtgtttttatttaccttttgatgtctatacatgtaagacatgagactctttacatccctgaaagcttggttaagatggtgtctgctaggtttattcactataaagtcactattttttcttttgtaattacaaagtgagactatgcagggcaatattgtgagacaatgtaaatatcctgtttctcatcatatatttgcccactaattttagcatatgttgatgattctggcttgaataaattattgttgtgacatttgccagacattgatttcaattttcaacatttttacatttattaattgattgaattatactgtaataaaaaactttctctttacgcttaatgtatatatttattcagctgtttatagcagtatggacttaatgaatatttgttttattctataggttataatgaattatgctcttactactttttgtttttgctgaaacccagatttggccaacaggagccccttcaaattggctcctgtgtcctttcaacatgtctccatcattttttaagcaccctcttactttctggcaccacagatgttccagactcttttttttttctttttttttttgagatggagtcttgctctgtcacccaggctagagtgcagtggcgcgatgatctcggctcactgcaagctctgcctcccgggttcacaccattctcctgcctcagcctcccaagtagctgggactacaggtgccagccaccatgccgggctaattttttgcatttttagtagagacggggtttcaccatgttagccaggatggtctcgaactcctgacctcgtgatccacccgccttggcctcccaaagtgctgggattacaggcgtgagccaccgcacctggcctccagactcattttttaatttccttgccccaactctggaatcagaatcttttctccaaggagctctgattctttttattggagaatggtatgtagaagccaagatctgggtgcttggcatgcttattgctactgaggtgtcattgcctctaggccctctcagcaggcagaactaggaaatatatgtatatatgcacacatacctgtttctatatcgatttcttgaagtccctctttatatatgtcaaaatcatggattcataatgatacatctgattccagtccaagaccctagaataaatatacatgatctcattctcttctggtatttctcttcacacgttttgtggactttgtagaggtcttatacagagtcttcaagaggttggcctctgaagtcagacatggaatctgactggtagatgtgtaactttcagcaaaatagtaatctttgagacttaatttcctcattggcaaaaggaaggccgtagcacctatctcacatatttttttttttaggatgaaatgagaaaagttatgtaaaacatatagtatttgacaccatagtaaatgttaaatcaattttagatttcattattgtcattatatttattgacttaccatttcttactacatcaactctcaaatctcctgtctgattttcaaggcctatcatgatcttttcccttatccaaccttatttttcattacagtttataatatactccctccagtctagcctaggtaagctttcctacaatcccgtgagcactgcatacacattttggccctccatcttgattagaattttgtggattcaagtctttgctcaattccagcaaatgtttacatttattcagcagatatttattcagcaacttctaagtactcaaaaattctatttatgctgttctatttctattcatggaggtgtactgcctacaaaatcattttgtgctagacactatggctaaaaccaaataaagacaaggttcttcccttcatggtgtttacatactggtgagaatagctaaatagtcctgtgaaactttcccttattatagtatcaaatactgattgtacctttctttgaacatttgtaatatttagcctctcccagtttcgtatctgcatgtatttggtcttataggcattttgttttatgacattttatctgttctttttatttgattaaagtcccttttgaagcaataactatatatttgttcattcaaccaattcatatgttgattttatatggtaacaaaagtaacagctgctcaatgttggaaacttgaaaaacataaagaaaataaaaatatgtccacagttctaccagcaggccagaactgtgctggctgagcacagaataatggtgtgtgttttgattattgttgtttttactattttctttcctatatatataatatgtttttaaaaataaatttggcatagaacaatgacttgtaagagtacaatttttgaattgtaaatgatatgttaaggtttggatgtgaatcacgaaactctaagcacaattcatgtttcaattgctatggtaaagttttcatttcatgaagatactgaatttttaaaatactaaaaaacctgattaaataaacactagctaataactaaaaaaaaagttggttaaaataaaaaagtaagttgggcttattctacatatagttttatttcttactgtttgatcacttatcaagcagtttcccatgttaacattcttagttttaaaacgttattttaaaatgattacatacaacttgtatttatacacactccaatttatttacctgttcacttttgtagagtatattttaaaatgtcaagatttgttagccatcgtaagaagtgctgccatgaacatttcttattccatatttttattattttattgctacagccgccttcatggggaattagtgggttaaacgctataagtatttttcaagtctttgatacatacagtagaccctgatatttaaaaaggctatatcaacagagaaattatggtaacttttttagtggttactatgttatatcctgttaggtagctaatgttatttccacttttatatacaaggaatcagaagcccacattggttaaataacttgccaaaggtcgtgcagttgatacatgattgggccaagatttaaaccaaggctctagaacctgctcatgagattctcctcaatccctatttcatacatggtagataatagagaaaagtaaagtcatgatgaaaagttgaataattctcattgccctttctgtaaacccttctgtgactggtcacttaagatgattctgaagaaagactctccattggctcatcttttaataagtctttaccataactgcctaggccgttcatccttaagggcttaaattttaattttgtgcacaatatatcctcctacttttctcccctgggcagaaggtggagcttgccctccacaaatacctctcctactgatctcttcccagctataacagtggtataacatactcaaattcattgacattctccctcccccagaagagttttgtgcatatgcatctgaaatgagagccccttctgaccactttccccacccctctcaccagcccctgcactgtagctgtctttcaggcttacacttaaatggctgtgtctttacctagtattgtccctagctttcatctctcccttagtgatactcagaaacttcccttcattaattcttaatcttttttttccactttggggagataatatcacagcctcaattccctctttttagaaaattaaactggttagtacatacggaatgtgaggtcccccatccattttgtaccactcccaatttgtaacatactcactttaccttctcctcacatttcctcagtagccaaatgacatcattgcctgtttgccagccctatagcttgcgcaattgaaatttatttctctgcaaagtcacaaactgttatgcattgtggtttttccaggtggcatttgaatagctgaactttaagctcctgagtgatagggatctgctcttgccaaattactttccagaatggttttaccaattatactcctatcagtagtgtataagagtgcctgtgagacagacttaatttttctttcctatctactacagtgactatggaattgatgctcaattgattgccagttggttggctgatttggtcttagtctctaatgattttcttttacaaatgtaatcattccatcatctcatccccttgtgatgatagcagctacggaacagaagtaatttttgaaaatgtattctttctaattaacattataaatgaaccacccagacacttagctaaatctttattataaagatttgtttttaaatagcagtaattcttgaggattttagagaaacaccttcagtgtgatatgtgacacataggcttctttcattttaacaaaccagattctcattttatgcaacttgaacttatttacctccatagtctgtccaggtccacccacactttgtgcctttagcagcttctgctggcctttaaccaaaagggcagtctatgatggtacttgctaccctgttgaaatgggaaccttaaatcccttgcttttcattaattaaagacagtcaaaggcaaatgttataaaagaaacaggcttttgctaaatttaatttttaacttttttattttaatgaatctgttataaatgtcagatgcttactaacttgtagagaatgtaagtaccatttacaagcaagttctattctggttaatggaattgtgtttttgacagtaataaaataagacttcaagaaattctgttaaggaatttgtatcatgctataattcaatcaaataatatttttcctgtatataggagaactggctggtttgctttcaaaatttcttacagtgtatatgacattaattgagtactgaaagagatatggaactttgagaggggcagtggtattaggagtgggacatgactgatgaattatttagtatattctgtgtttacaagccctccaaaagcttgctaaaggaggactggtccttctctgtccatattctcacaatttaattgatgtagtaaaatgtttctgtatgtggaagatagtcatggtggtgtctgtttatattagataggttgtttttcttgcaagtgctaaaaaacactatctgtcttaaacaataaaaacaatttttagctcacataacaagaagtttggaggttgattatctccaaagttaattaattcagccaaataatgacactagtaagggccagagtttgttccatttttctgtactgccatactctgcctatcaacttgccctctaatattagtgcccctcatactctcaagatggctgctgcagttccaggaatcacatgcagacactgcaatgcccactagaaagagagtatgaactattcatgtgtatctctttttactagcaatggaaactttctaaggagtcccacagcaccaccctgaaaacacctcttatttatcattggttgaaatcgtgttatatgtatatgcctacaccagtacattggcaagtggtatacggacataaacgtagagttagtccagtcactcacacaaccacctctccctgccctgcgtctggccaaaacacattgctacctagaaaagttggagggtggaaaatatgtaaataaactcatgatgttttggggggaaggaagaaacagtttctatttcacaacctcatgagtttgtcctcaggatcagttgatacaaaagatttgtaagaaactggtgtatttgttaaatgtgatatattacttatctagggaaacgaatgttttgtatagttctacaaatgaaagttgttgactgttcataggcattttagagctggagggacattagtgatcttttaggtcagtagttctcaaactgtggtctgtggacccctacggttcctgaaatcctattagagaacatgaggaatattttaacagtaatattatcttagtctgtttgggctgccataacaaaatacctcaggctgggtggcatataaacaacaaattatatctcattgttctgaaagctgagaagcctaagatcaaggcagatcaaacctaagattcagtgtctggtgagggccctctttctggttcacagatgttatggtctctctgtgacctcacatggtgaaaggggaaaggcgtttttttctctggagcgtcttttacaagggcactaatctcattcatgagggcttctccccgtgacataatcatctcccaaaggccccacctcctaatgccatcaccttgaagattataattttaaaacatatgaatttttttggaggggacataaacatgtatcatagcaaatacgaagaatgtttacttttctcactatgttgacatttgcactgatggtgagtaaaattactggtgcagtgtaccacattttcttagtagttgtattcgtcatactctcaggggggagaaagccagttttacctcagagggtcctcaatgtagcattaatttatattaattgaattttgacccttgagtgtatgtctttttaatattacatatgacaaaattggaagtatacacaaagcacttatgtacgctgaagtaagatagttgtttctaggaaaagcacttgtgcaattgtttgagttacgagctgaaccagttgatttttgcatggaacgcttttttgtttgttttagatacagggtcttgctgtgttgccccagctggtcttgaactcctggcctcaagaggtcctcctgcttcagccccccaaagagctgggattacaggcatgagccaccaagcccagccaaaattcatttttacttgaaaaacaactgagacaaactgtggttatttatacttgggtatttggcgggcattttcttgaaaatgagtagaattagcctaccacttcagggaaaactactggcagtatttgtggccaatgaaaaatttgagcttttcaagtaagaatgagaattttggaaaacttgaacctgacaccaagagtgtgacagcttcccaaatcttagacttttctaatgaagctggtaattatattaatgtgtattttttatattgtacaataaattgtgttaacatttggaagctctgcataggtcagtgaactaatgttttccaaatgactaatacacagtgttacaaaatcatgcatagggaaaagatcccttcaaagggcaagatagatcgagtttaatgtaattgaataaaaaaagctagtttttttatttttattttttatttttattttattattattatactttaagttttagggtacatgtgcacaatgtgcaggttagttacatacatgtgccatgctggtgtgctgcacccattaactcatcatttagcattaggtatatctcctaatgctatccctccccactccccccacccctcaacagtccccagagtgtgatgttccccttcctgtgtccatgtgttctcattgttcaattcccacctatgagtgagaacatgcggtgtttgattttttgtctttgcgatagtttactgagaatgatgatttccaatttcatccatgtccctacaaaggacaggaactcatccttttttatggctgcatagtattccatggtgtatatgtgccacattttcttaatccagtctatcattgttggacatttgggttggttccaagtctttgctattgtgaatagtgctgcaataaacatacgtgtgcatgtgtctttatagcagcatgatttatagtcctttgggtatatacccagtaatgggatggctgagtcaaatggtatttctagttctagaaccctgaggaatcgccacactgtcttctacaatggttgaactagtttacagtcccaccaacagtgtaaaagtgttcgtatttctccacatcctctccagcacctgctgttttctgactttttaatgattgccattctaactggtgtgagatggtatctcattgtggttttgatttgcatttctctgatggccagtgatgatgagcattttttcatgtgttttttggctgcataaatgtcttcttttgagaagtgtctgttcatgtccttcacccactttttgatggggttgtttgtttttttcttgtaaatttgtttgagttcattgtagattctggatattagccctttgtcagatgagtaggttgcgaaaattttctcccattttgtaggttgcctgttcactctgatggtagtttcttttgccgtgcagaaactctttagtttaattagatcccatttgtcaattttggcttttgttgccattgcttttggtgttttagacatgaagtccttgccaatgcctaggttttcttctagggtttttatggttttaggtctaacatttaagtctttaatccatcttgaattaatttttgtataaggtgtaaggaagggatccagtttcagctttctacatatagccagccagttttcccagcaccatttattaaatagggaatgctttccccattgcttgtttttctcaggtttgtgaaagatcagatagttgtagatttgtggcgttatttctgagggctctgttgtgttccattgatctatatctctgttttggtaccagtaccatgctgttttggtgactgtagccttgtagtatagtttgaagtcaggtagcatgatgcctccagctttgttcttttggcttaggattgacttggcgatgctggctcttttttggttccatatgaactttaaagtagttttttccaattctgtgaagaaagtcattggtagcttgatggggatggcattgaatctataaattgccttgggcagtatggccattttcacgatattgattcttcctacccatgagcatgacatgttcttccatttgtttgtatcctcttttatttcattgagcagtggtttgtagttctccttgaagaggtccttcacatcccttgtaagttggattcccaggtattttattctctttgaagcaattgtgaatgggagttccctcatgatttggctctctgtttgtctgttattggtgcataagaatgcttatgatttttgtacattgattttgtatcctgagactttgctgaagttgcttatcagcttaaggagattttgggctgagatgatggggttttctagatatacaatcatgtcatctgcaaacatggacagtttgacttcgtcttttcgtaactgaataccctttatttccttctcctgcctaattgccctggccagaacttccaacactatgttgaataggagtggtgagagagggcatccctgtcttgtgccagttttcaaagggaatgcttccagtttttgcccattcagtatgatattggctgtgggtttgtcatagatagctcttattattttgagatacatcccatcaatacctaatttattgagagtttttagcctgaagggttgttgaattttgtcaaaggccttttctgcatctattgaggtaattatgtggtttttgtcattggttctgtttgtatgctggattacatttattgatttgcgtatattgaaccagccctgcatcccagggatgaaacccacttgatcatggtggataagcttaaaaaaagctagttgataaagtttcagattctacattacaactaaccttatcttaaaaggctattagaatgcacacttttccagctatataactattggaaaccagattttcttcatatattttaagtaaagcaatgtattccaacagaagaaatgcagaagcagataggaggattcagcttttgtcaaagcaaagaaatctacaaaaaaagtaaaataatctctcttcccactatttttttttgttttggaaaatataagtaattttcataaaaattcataatatatgttaacatttaatgggtttattgccacttgaaaatgaataaataattttaaatattactcagttttaatttttatatggtatatgttgatagatgtaatccagatgatggggtcttcaatactttttaagagagtaaaaaggtcttgaaaacaagaagtttgaaaactactgctataccgaggccaactccatcttttacatgaaagtgattaatgaaagatgataactagttatttagttgcagaggcagagatggaagctgtattttctgaatcttattctcgtcctctctccagtatactacattggtttagggattggtaaattgataatatgatgtggtaattttgttcatcgtggtagatacagttaaaataccaaacagaaaatgtagatactagattgtactcgtcttgcctaccattttcaatccaattgccaagtcagaaacattcttgctacacaaaccacagcagaagagacacacacaaaaaatagctaaagttgcagttacttttaggtactaaattggaaaattcatgaaaccagagttcttatcttacatatctttgtattcaccacagtgcatggactggtttcttctatatagttatctctcaggaaatagttgttgaatgaatgttgaatttggggaaggagtagatttatccggataacactaagaggcaaaacttagaatcaatgggttaagttacaggaaccctggatagcaataattttcttttttcttttcttttctgttttttgtttgttggtttgttttgtttttgttttgttttttgttttgaaggaatcttgctcttgtcgcccaggctggagtgcaatggcatgatctcagctcactgcaacctccccctcccaagttcaagtgattctcctgcctcagcctcctgagtagctgggattacaggcgcccgccaccacacccagctaattttttatttttagtagaggcagtgtttcaccacgttggccaggctggtctcaaactcctgacctcaggtgatccaccctcctcggcctcccaaagtgctgggattacagtcgtgagccaccatgcccagccagcaataattttctaacagttaattatttgctacttagtaatggaaatgtctcattagtaataggaatgttcctttactaaaaatgctcaaatagaaggtggatgctgctctgtctgccaacatacccatgaggtccctttggactctaagattctgttttttctggtaattagaaggaaaatactttcttactgagctcaagtctacttctatgattttatcgagacaaggtctcctgctgcctaggctggtctcaaactcctggactcaagggatcctccaacctcagcctcccaaagtgctgagattacaggtgtgagccaccacgcctggcctacttctatgattttaaagcaaattttaggtataattgacatacaataaaatgcatatatttgaagtgtacaatttgagttgtgacatatgtatacacctgcgaaaccatcacaacattcaagataatgaacatgtaaattgctccaaaagatttttattcctctttgtaatccctcccttcctacccccatcctccatccccaaataaccactgatctgctttctgtacagtagaaagtttcattttctagatttttatataaatgcaattatatgatatgtatacattctttgctctgacttatttcacttagcataattattttgagattcatccatgtcatggtgtgtgtccatagtttattattttattgcacagtagaattccattgtattgatacaccacactgttgatggacatttgggttgttttttgtttgtggctattaaagttgctatgggcattttcttgcactttaaaagtactaaattgagctataatttccataaagtgatacacagtgatcttaggtgaacagctcaattattacttaactcaattataacttaacaaagtgtataccaatcatatatactttggtaactaccaaccaagtgaagatgtagaacgtttccattaccttggaaaggtccctcatgcccgtcccatttcaatgtcttttgtgtcttgtctgaataagccacaaggttgtgaagatacatgttttcttccataatctgtatagcttcagattttgtatttatgtccatttttcttatatagatacccagttgttccagtattgtgtatttaaaagaaaaattcctttttttttcattgaattaccttgaggactttattgaaaatcaatggaatgtgtatatgcaggtgtaggttgaaactcactagtctgttctattcacctgtttgtgcatccttatgccagtatcacactgtattgattactgtggcattactttggtagcataagtcctttacatttcttcttattcaggattgtgttagcttttgtgttggctatttattccatataaattttacattaatcttgccaaattttgcttaaaaaccttttgaggttttgataggaattgtaacaattgtgtagatcaatttaggaacaactgaaatcttaaaattattatttttttcaatccatgaacaccatatacctctccattaatttaggtattctttaattagcttcatcatagaggtcatgcacatcatttgttaaatttcttcctatatgaataattctattctaaatggtatcatttttaaaattttatttttagttacttgttgctaagatgtagagatgtgattcatttatatattgatctgtttatccaaagataaaatgctaattaattttcttatggtatgatttacatactgtaaaattcacccactttatgcacagttctattatttttgacagatgtatacagtaatataaatatagtctctaatcaagatatagaacagcatttctaaatttattcattagttctagtagtcgtgtccatttctttggattttgtatgtatacaatcatatcatctgaaaataaagagggtcatagtttttcctttccattacctatgtctttttgtcctggctatcttattgcactggctaggacctccagtacaaatataatggaagtagtaaagaatgactttttttttgctgtcttttaaggaagatactcaatattttgctattatatcagctgtaggttttccataaactttacagatcgaggtggtcctttttcatttctatttgctgaaaatcttttttaaagtaatgaatgttaaatttcatcaaaaaataatttgtatctctttaaacaatcatattgtcaggagctcagccgagctgctaggtgtcagacaccaagccaaaatcaaaataatagtcaagcctttaatcacttagtgtgattatataaacaagaagctaaaccggagaaagtgctgaggactgtcctcacttcccagttacatttttccccatggtagattggaccagcacaggcttcgggggtctgtgttttctcactgacaagggagccccaaacaaaaggctctggcagtgttagggacccaggggtttgggggaggaagaaggaaaaggctaggtgtggaaaaatacctagtactgagtcagagtggaaagaagtgtcttcaacgtttgctcccacttcctctgctgtgaatatttgtaaacaagtctttgggtagacaaatgctttcattttccttggataaatatcaaggaatggaattgctgggttgtagcattagtctatttttagctttacaagaaactgccaaattgttttcctaagtggttgtaccattgtactttccactgaagtatgaaagttgtagttgttcctcgtcagaactgtgcataaaatgggtgaattttacagtatgttaatcataccgtaagaaaaataattagcattttatctttggataaacagatcaatatataaatgaatcacatctctacatcttagcaagtaattaaaaataaaatttttacctgcatttgatattgtcactctttttaattttagtcattttgatatcttagtattggtatgttcttgtcattttcttatagtcaccttttgtttatattgagtaaaattcgctatctttggtgtactgctctatgagttttgataaaagcatacaacctttaactactgccgtaatcaagactcagaatacttccataacctcaaaatgtttcctcatattgctatgtaattaacctctctacttacccacagtttctggcaatcactcatctattttctgttcctataattttaccttttttataaatgtcttatagattgactcatccagtatgtaaaattttgagtctagctttttcctcttagcataatacatttgagatccatccatgttatatgcatcagtagtccatttcttttttatttgttttcttataattgagtaggaagagctttttgtgcattctgcatataatatattcatttcatacatacatgccatgcggatatgctctgccatttggtggcttgcgtttttgttttcttacctataattttcagagaataaaagttgaattttgatatagtccattttatcacctttttatggttatagctttctgtcccctttataagaaatctttgacttccccaaggtcaccaagattttctttcatatttgcttctaaatgattttatagtttttgcttttgatccatttacttatttttgtgtggtgtttggtaagagttctggttcagtttttatcccatgtgtttagttccagcaccatttgttgaacagactatcccttccccattaaattaccttgatacttttgttttgtaggtctgttttgtattctagtctgtttcaccaatctctatgtctatccttatgccaataccacaatgtcttcactactgtacttttatgataaggtctgaaatcaggtaatgtaagttctccaaatttgttcttttcatattttggggtctcctcttcgcccccgcctccttctttgaatttctatataaattttacagttaccttggcaatttgtacaagtaaaactcctggagttttgaatgggattgtatttaatctataggtcatttttgggaaaaatgatgtcttaacagtattcagtgttctgataagtgaacatggtgtatctttccgtttattaagatcatctttggccgggtgcggtggctcacgcctgtaatccgagcactttgagaggccgaggcgggtggatcacgaggtcaggagatagagaccatcctggctaacacggtgaaaccccacctctactaaaaatacaaaaaattagttgggcgtggtggcgggcgcctgtagtcccagctactggggaggctgaggcaggagaatggcgtgaacccgggaggcggagcttgcagtgagcccagatcgcgccactgcactccagcctgggtgacagcgagactccgtctcaaaaaaaaaaaaaaatcatctttaatttctctcagcaatgttttcagtgtgcaggtcttatatgtactttattgaactcatcccctaagtattcatgtatttgaattgtactataaatggtatcgtgttttattttctttcaattgtttgttgttggtatatagaaatacaactgatttttttttctattgacctgtacactgtggtcttgctaaattgattatttttagtagctctttcatggattatttataattaactacatacatgattatgtcttctgtgaattaagatagatttgcttctttctttctagtcttcacactcctttttttccccttattgtactaattagggcctgtaggataacgtttaatgtaagtattaagaccccagttctttgctgccttttcccaatgtttgaaaacatatgcttcacacattttgtacagtttcctagttgtttgtagcaagagggcaagtctagtagcaatcattccaacaaaatctgctttcagttttttgatatttataaataacaatgatgtgaacatttttgaacgtatttgcacttcagattatttcctttgaacagagttctaaaactatatattgtaatctatatacatatatctgtatctatctctctgcctgcatatttaaacctacagtataagagctacctcaagagcagtgactatatttcaaatttatataccttgcatcatctagcagacagcctttcattggattaatggaaagtaaaatctttatgattaattttctcatacccagagtatctatttaactatagcatagagatatttctaatcttgcctgtgaagtctaaaaagactgtgatcattaccatagttttaatttactattactttattttgcttcattttaactgtcttatttctctttgataatgttgtaggaaacaagaaatatgtaggtcttaactttggccactgttaaaaattttttttaaaaaaatataatttggtttattttgagaaagggaagacatttttcctaactttcctacattttgtgttaactttgtaggatgttgtttgagcaatgaccctgtaggacgtggccttacacattttgagttcatttgagttaatttagtttcaggaaggcttctgaaataggaagcatttattcaagctttagtattccttctgaatagttttgctagctagctataaacaggccaatttgccctagctctaagtttatgttaattttcattactttgtttcaaaataaaagggccaattcccgttacattttgatttaaaaaattaagctatacatttttcttagatgtgggtatgttaaagcttttcaatgtctggcaaaattaatcaccctaggccgtggatttccttgcccccaactccctccaccccctaaagatacttgataatatgttggaaggagagaaataatagcttttttcttccagttcttatggtcaggtgagttcctagggtttttgtttgtttgtttgttttgagacagagtttcgctcttgttgcccaggctggagtgaaatggtgcggtcttggcacactgcaacctctgcctcccggattcaagcaattctcctgcctcagcctcctgagtagatgggattacagatgcctgccaccacgcctggcaaatttttttttttttttttttttttttttttttagtagagatgcgatttcaccatgttggccaggctggtctcgaactcctgacctcaagtaatccgcctgcctcggcctcccaaagtgctgggattataggagtgagccaccacgtttggctgagttcctagggtttaaatgttttaaaatatttttattcatagtatactcaagttataggaatttggttaatagtgaataaattcattcttagcaccagcctctctcaattctatttgcttgcttatcttttacagcctatttagacatatcatttttctccacagttgcagtaaagacttctttctgttatagcgcaagcttattagaccttatcacagccttcatgccttcatttgtgtatactatataatgggaaaaaaaagactaatgttgtaaattaacaagtgagatcaaactgaaaaaggtcacctttcttagaggctgaaaaagagattcattttctggggcctggatttgtttttctgactaattttactgccacttttgaatttgcagattgacaacctttatactaaaaatatttatctgtatcctagtagatttccaaatccatattctcagttttctctactccatgatatgcagatatggaaaaggaggcattttttttcccctcagatggttaatgttataatttgaaattggtaatatgctaataaacaaaggtaggttcaaaatcagatctttctgatttccatgaggcattgtaaatattatattacttaggatttgttttaaaatcaggttccaatttaagttggaaaaaactgaaaatgtttagaggtaacagtgattaaattatttcagattattatatttttcttagttttccctacatgtctacttcttcatctgttgttttactttatggtacttaaacattctataaagttttttgtttttttttgagttggagtttcgctcttgtcatccaggctggatggcatgatctcggctcactggaacctcacctcccgggttcaagccgttctcctgcctcagcctcccaagtagctgggattacaggcatgcgccactacccccggctaattttttgtatctttagtagagacaggttttcaccatgttggctaggctggtctcgaactcctgaactcaggtgatccgcctgccttggcctccaaaagtgctgggattacaggagtgggccaccacacccagcctctataaagatttgtagtgcgtttaaacattaatagaatgaaaaagtattataaaaggcaagaatatagacataggttctcattaaatcacaattaatggaaatgtatactcatagcaaaattaattatgctctttttgggtagaatattctggagcctaaagtttcatctccttttcataccactgtccttaaaaatgcaacattagcttaaacatgaatttgtttatattaacataaaacttctctataataaatgtttattcaaaattgaaggaggaaaaaagatttagagtaagatacatactaatattaaatactagtgctgagattatgagtcattttttcttatatgtattttctgttacctacagagaaatagtaatagtaaatgcctattactattacaataaaatgattttaaaatatttaatattagtttaacatatatttcaacagttttttgatttaaataatttaacaacatattttacagtcatagggttattttattttatttttgtttgtttcttttttcagacaggatctcactctatcacccaggctggagtgcagtggtatgatcatggctcactgcagccttaaccttcagggctgaatcaatccttccacttcagcctcctatgtagctgggattacaagtgcacgaccccatgccccgctaatttttgcagagacagggtctcactatgtttcccaggctggtctctactactgggcttaagtgatccactggccttggcctcccaaagtgctgggattacaggcctgagccattgcgtcccttcctatcctccctctcttgtaataaatgttttaggtagtttttaaagttttcttttacttggctttcttaaaggagaacttcagttgcttttttccagtaaaaaattccagagactgccagaagaagcctaatgccagtaataattctgtcattgaacataatggagaggagtcatcttaatttgtatgcactcttttttatatcaagtgtaacacatattcttcttgtccttccctccaagtgggttacaaacagcttttctctttcactttaccaacattaaaaagagtgattttaagaatgctggatccacctttttccacttatatttggaatgaaatgtgtaatttatgtatgaaacctttaattttaatttaaggtctcgtgaaagcaccaaaactctttagataaattgacacggagttgctttaagatacaaattccttcttagtaaaaaaaaggaagaattttaaaactttatgttttaattgtttctagttgaattcagaatattaaagctttgttatatatgtggtaactctctaataaatacttcaagaaagtatctcagtatttaattaattatgagtactataatttattctaaagccttaataaaatcaaatttctattagtttatgcttttctcaatgttcattgaaaatattgagtcatattacctattactgccccaatccccagcccagcttgtaactttcctgaggaggaaaattgagtaaacctcagtgattatttgacagttgactccatagctaagctggaagacagggtgttgtgggagggagataacgcttttagggttttactgaagaaaggatgtagattttctgattctgttttgaagatgatataggtggatgctgctgggagaaatgacagtggcatcccattaggcctgtcgtgcccatccccttttaggattctgcatatctcttagtttttcctttgtcaggtaacaaaggtgtaacatgggagatatattccacttctccacattgttagcttagtgtagtactctatccagcaaattattggaaagagcaggatttggaagttagactagattttattgcttgggtagagagagaatgctcaagagagcttatcctggacaccagaggatgagcaattggaaagatggactgctttatcatttttgtgttattttgcaatagatagggcagattcccctctttttattgcagtacaaaatccctttaatagctagctctaacgttactatggcactatagtgtaatggtttagtttagagtatgggcatggatgtcagactcgacttgtatcgagactcttccacctaccaattgggctaacattattagtctaaagtgtcttaatgcctggcgtagagtaagtgttcaataaataattttccacaggatctatagtgtcctcttccaatataatttagttcaatcttaagcctaatagtttgttttccttcctgatcccctttcttcatctctagcattttaccataggagggaaagatgtcttagaaacacttttttagtttatttctagaggtattggctagacttcatgtcagttatatgcatataccaatattttatatattaaaaacaaatataatccctagaatagcattgtctgattagagataaaatggtctcaaaagaggacaggaaaatagggaagtgggagtagtagtaaagagaaatgtaaaccaatgtgtaaacaagaaagcaggtttatctgcaactatagggaagaactgttcaaattaccttgcacatttttatttcttaggaggcttcttaagattttaaattaagttattaaactatttattgggttgaattaaatatttagataaatgcagtatatagatatgtctgtctgtatgcatatatgttaaatacacctaagtttcttatactttaactaattttgggattccttctcacccaaaagaaatttaaataaatactttggatatttctgtaaatacagcatgccatttagcaaatttaagggaacaagtgaataacttagctatgccaacaatgttttgcctccgcattccttggcgcaaacagggacctcagtgaagcgttcctcatgggagttgcctggggaaatcttactgaagaagtctaggtcccaattcaggctcctttcccttctactttctaaaatatcaactttattgaggtatagtttacatacaataaaatgtactagttttaagtgtacaatttaatgattgacaaatgtgcacacccacaacattttcaatattgagcagtttcatcaccccaaaaagttccgtttgtttttcttcccagtaaatctttccctatccctgtaccctgaaagccactgacctgctgtcactatgaatatttgtgtacaagtcattttgtacacataattttcatttctcttgggtgagtgcaaaggaatagaattgctgggctgcataaatatgtaatgtattgaaccttacaagaaacaaatatgtttgcaaaataataggaatattttacattctcaccagcagtttataagacttttttaattatagctatcctggtgggtatgaagtggtatcttgttgttttaatttgctttttctgatgttgagcatattttcatgtggttattggccattcaaatatcttcttttgtgatgcatattctcaaatctttgcccatttttttcaaaagttggattacttgccttcttataattgtaagagttctttatttgtcatgtttacataaatatacacacacgtatattatacacacacctagtatttttcccattctgtgggtcgtattttctttttcttaatggtatattttaattagcagaattcaaaaattttatgaagcgcagcttatcatttttttctttgatctttattgccctttgcattataaggaagaatcctttaactattaatacactaaagttttaaattttgcctgctttcttctagatatttggtgcttttaacttttgataaacttagtgttattttggtgtgcagtgtgagttaagggtcctggtttaatttttaaaaaaattatcaaggtgaaatttacataacataaaattagtcatttaaaagtgaacaatttagtgacatttcgtatattcatcatgttatgtgaccacttctacctagtactaaaaatttggtttctctcactccaccttgtccctggaaaccatcaatctgcattctgtctctgtggatttacctattctggatatttcatataaatgaaataatacattatgtgacattttgtgtttgacttatttcacttagtattttcaaagttcaacttcattgtacatcatccctttttatggctgaataattttgcattgtatggatataccacattttgcttattcgttcatccattgttggacatctgggctattaccactttttatctattgtgatgagtgctgctatgaacatgtatatatatatgtatttgtttgagtacttgtttttaatatttaagggtgtatccttaggtgtggtattatgggccatatggtaattctatatttacgttttaaggaaccaccagactattttccttggcggtttaaacattttacttcgccaccagcaaggtatcagcatttcaagttctccacaatcttatcaacacttgttatttttgttttgtttattttaagttttaattttttaattatggccatcctagtttgttatggagtggttcttcattgtggttttgatttgcattttccgaatgcctgatgatactaagcatttttcaagtgcttgttggcaatttgtatatcttctttggagaaatatctattcaagtcctttgaccatcagtatttttttttttagacttaaggtcttgctctgttgcccaggctggagtgcagtggtgtaatcatgcctcactgcagcctttaactcctgggctcaagtgatcttcccatctcagcctcctgagtagctgggcctgcaggcaggtggcaccacatggccaaggtggctttttttttttcttttagaaatggggtcttgctatgttgcccaggttggtctttcttgcctctgcctcccaagcagctgggattccagccctattttcaagttgggccgtttatctttttgttgttgaattgtaagagttatttatacattctgaatactagacaaatacataatttgcaagtattttctcctattctgtaggttgtttttttcacttttgtgataatgtgctttaatgcagaaacattttaaaatttcatgaaatccaatttgttttttttcctttcttgcttatgcttttggcgtcatatctaagaatccattgccaaatccaaagccatgaagagttatctctatgttttattatacaagttgtgtggttttagctcttatgtttaggttgttgattcattttgaaatagtttttgtaaatggcatagaggtccaactttattcttttaaatgtggatatacagttgtcccagctgttattttctcattgactagtctaggcacccttatcaaaaatcaatttaccattgatgtatgggcttatttctagactctccgttctatctcaatggctatgtttatctttatgccagtaccacactgttttgcttactgcagctatgtagtaaggtttgaaatcagaaagtgtgtgtcttccagctttcttttactttttccagattgttttggttcttagggccccttgcaattccatatgaatttgaagattgactttactattactctttctgcataaaaggctgttcaatagggatttcattgaatctgtagattgctttgggtagtattgccatcttaataatattaagtcttccaatccaggaacacaagatgccattcattcatttaggttttctttaatttctttcctcattgttttctagttttctgtgtacatgttttttacctccttggccaaatttattcctaggtgtgttttattcttttggatgttattgtaaatggaattattttcttaatttcctttgtagattgttcatttgggctctatagaaataaaactaattttgtgttttgattttgtaccctagaactttgctgaatttattagctttagtagtttatttgtggattctttaaggctttctgtatacaggttgagtatctcttatctgaaatgcctaggaccaaaagtgtttcagattttggagtttttcaggttttggaatgtttgcatatacataatgagatatcttggggatgggacccaggtttcaatatgaaattcgtttatgttttatatacatcttatacacatagcctcaaggtaattttatactatattttaaataattttatgcatgaaccaaagtttagactgcgtttttactgtgacccatcacatgaaatcaggtgtggaatttcccacttgtggcatcttgttggcggcactcataatgacttgaattttggagcattttggattttggattttcaggttaggaatgctcaacctgtatgaaaaaaatatatctgcaaagagagatagctttgtttcttcctttccaatttggttgtcttttatgtctttttctagcctaattacttagctaaaacttccagtactatgttgaatggaattggtgaaaccaagcatccttagtttgttcctgatcttataggaaaacagtttttcacctttgagcattcagttagatgtgggtttttcgtaagtgtttttttttttttttatcatgctgagactgctcctttacattcctggatttgagtgtatttattaggaaagggtgttggattttgtcagatttttttttttatcattgagatgatccaaatgttttttcctattggttctattaatgtggcatattgcatcagtgggttttcttgtattgaaccacattgcattcctgggataattctcatttggtcatggtttataattcttttagcatgctgttggatgtggtttgctagcatctgttgagggttttttttttgcctctatttttacagggactattaatctataattttattttctttagcatctttggctttcatatcagaataaaactatatttatagaatgagttaggtagtgctattctgctttttggaagagtgcgagagtaattggtgttgttttctttaaatttttggtagaattcactagtgaagctatctagctatggactttacttcgttgttaggtttttgattattgagtcaatgtctttacttgttatgaatcttttcagattttctattttttcttgagttagtttaggtaatttgtatgtttctagaaatttgcccatttcatctaggttgcctaatttactggtgtatgatttttcatagtattttctctctctctctcttttttttttttttttttgaaacgggatcttgctctgtcacctaggctagtctcaaactcctgagctcaaaggatcctccttcctcagtctcccgagtagctgggactacaggcacctgtcactgtgcctggctaattttttaatttttattttttgcagagatggggtcttgctttgttgcccaggctggtctcaaactcctgggctcaagtgatcctcctgcctcggtcttccaaagtgctgggattacagggatgagtcatcatgcctggctcatagtattttcttataattctttttatatctgtaaggttagtagtaatgtcttcattttcattttttatttcagttatttgtatcttctccctttattttttagtttagctaaagatttgtcaattttcttggtcttttcagagcactaacctttgttattttattttattttcaagttttctttttgctttaaagctataatagtaaacaacataatttgcacatatattcaggctcattttcaaattttattttcatttcaaagggcacatgtgcaggtttgttacatgggtaaattgtgtgtaactgaggtttgatgtatgaatgatcccattacccaggctacctcctctagtagtccccagtgtttattgcccctctctttgtgtctgtgtgtactcattgtttagctcccacttataagtgagaacacgtggtatccggttttctcttcctgcattatttcacttaggataatggcctccagctgcatccatattgctgcaaaagactcgatttcactcatttttatggctgtgtagtgttccatggtgtatatgtaccacatattctctatccaattcaccatcgatgggaatctaggttgattccatgtctttgctattgtgaatggtactgcagtgaacaaagacatatatgaaagtgcatgtttttggtataatgatttcttttttggggggtatatacccagtaatgggattgctgggccaagtggtagtcatgttttaagttctttgagaaatctccaaactgcttttcacagtggctgaactaacatacatttacaccaacggtgtacaagcattcccttttctctgcagtctcaccagcatctgttttttgttttgttttgctttttaataatagccattctgactggtctaagatggtatatcattgtggttttgatttgtatttctctaatgattagtgatgttgagcattttttcatatatttgttgcttgcatgtatgacatcttttgagaagtgtctgttcatgtcctttgcccatttttaaatggagttatttgtcttttgcttgttgaattaagttatttgtagattctggatactatacttttgttagatgcatagtctgttaatattttctcccattttgtaggttgtttgtttactgtgttgatagtttcttttgctgtgcagaagctctttagtttaatgaggtcccacttgtcaatttttgtttttgttgccattgcgtttggggatttagtcataaattatttcccaaggctaatgtccaggatggtggttcctaggttttcttctaggattcttatagtttgatgtgctacatttaagtctttaatccatcttgagttaattttcatatatggtgagaggtagggattgagtttcatttttcttcatatggctagtcagttatcacagcaccatttattgaatagagagtcattttcccattacttgttattgctgagtttgtcgaagatcagatggctgtaggtgaaaggctttatttctgggttctttaccctgttccattaatctatgtgtctgtttttgtaccagtaccatgctgttttggttgctgtatccttgtagtgtagtttgaagtcaggtaacgtgaggcctccagctttgttcttttggcttaggattgctttggctatttgggctcttttttggttccatatgaatgtataaatagtctttttctaattctgtgaaaaatgacattgatagtttgataggaatagttttgaatctgtagattgttttgggcagtatggccattttaacgatattgattcttctcatctgtaagcctggaatgtttttccatttgtttctatcatctatgatttacttctgcaatgttttgtagttcttcttgtagagatatttcacctccttggttaggtatattcctacatattttttggtgactattgataatgagattgctttcttgatttggctctcagcttgaaccttaccagtatatagaagtggcaatcatttttgtaccatgattttgtaacctgaaactttactgaactcgtttgtcagctctaggagccttttggtggagtcaatagggttttctaagtaaagaatcatagcatcagtgaagggagataatttgacttcttttacaatttggatgccttttatttgtttgtgctgcctgattgctctgcctaggacttcagtactatgtcgaaaaggagtggtgagaatgggcatttttatcttgctctggttcttaagtagaatactttcagcttttgcccttgcggtatgaacttggatgggggttaaagaaccaacttttggtttcattgattgtctcgattgtttttatattttctatattgcttatctccactctaatctttcataatttcctttcttttgctagctttgggtttagtttgctcttccttttctagtttcagaaggtataaatataggtcatttatttgagctctttctcatcttttaatgtaagcatcgactactataaattttcctcgttacaatttccttcactacatcccataatttttagtatgttgtatttttattttcattcttctcttaagtattttctaattagttttgtaatttcttctttgacctattggttgtttaagggctacattatttaatttgtacatatttgtgaaatttccagctttcttctttttattgatttgtagtttaattccattgtgattggagattacattttgtatgacttcagtttttgatattttttcagacttattttgtggccgtacatatgttgtgtcttagagaatgttacatatgcacttgggaggaatgtgtattttactgttgtgtattctatatatgtctagaaataggcttatgatgttgttcaagacttctgtttccttattggtcttctgtgtagatgttcaatccattattgaaaattgattttcgaagtatccaacaatcattatagaactgtctatttcttttttaaattctgtcaagatttgcttcctatatttagaggctcagttacttggtgtgtatatgtttataattgttatatgttgacgaatttacacttttcaataaataatattgttgtcttttgtaacaggggtgacttaaagcctaatttgttggatattattataatcagccaccccagctctcttttggtcattattttcctgggatatctttttttctttcttgaaatttcagcccatttgcatctttgaatctaaggtgaacctcttgttgaaagaatcccttcagaatgctaatttcatttcctttgggaatatacctagtagtgggattgccagatcttatggtaataacacttttagttttttgaggaaccgccatactgttttccaaaatggctgtactaatttgcagtaccaccaacagtatataagggctcccttttctccacatcctcgctaacattcatcttttagctttttgataacagccagtctaacaggtgtggggtgttattgtggttttgatttgcatttctctggtgattaaagatgttggacatttttttgtgtatctgttgaccatttgtatgtcttcttttgctaaatgtctattcaagtctttagaacatacattcctcacatgtttgtggtgatgctggtttaaaccaattgcagtgctagtcatataaaagtatagtacatacaattatttatagtatgtaatataataagtcactatgttactggtttatgtgtttaccatactacactcttaccattattttgttatcactacttcataagtagaaggagtgtattccttcttctcataacacaaaaaagttaactgtaaaatagcctcagtcaggtacttcagaaggtatttgagaggaaagtattgttatcataggaggtgacagctccatgcatgttattgcccccaaagaccttccagtgggacaagatgtggaggtagaagacagtgatattgatgattctgaccctgtgtacgcctagactaatacgtgtgcttgtgtcttagtttttaacaaaaagttttaaaagttaaacaataaatacagtattttaacaatagaaaaaaggttatagaataaggatataaagttttatatatatatatatatgtatatatatatatatatatatttttttttttttgagatgaagtcttgctctccagtagcccaggctggagtgcagtggtgcaatctcggttcactgcaacctctgcctcccaagttcaagcgattctcctgcctcagcctcccaagtagctgggatcacaggcacctgccatcacgcctgggtaatttttgtatttttagtagagatgggattttaccatgttggccaggctggtctcaaactcctgacctcaagtgatctgcctgcctctgcctcccaaagtgctgggattacaggtgtgagccactgtgcgctgccaataaaatatttttgtacagctgtacaatatatctgtgttttcagctaagtgttattacaaaagtatcagaaagctaaaacaattctaaaaagtttataaagacagtcaaagtaagctaaggttaatttattattgaaggaagaaattttttatgaatttaatgtagcctaagtgtacagggtttacagagtctatagtaatatgcagcaatatcctagttcttcatgttcacatactacccactcaactggttcaaccagaacaacttcaagccttgcaatgtccattcatggtaagtgccctatacaggtgtaccatttttaatcttttatatcatttttaaaatcttttatatcatattttatatttcatatcatattttactgtaccttttctatatttagatatttctagatacatacttaccattgtgttacagttgcctacaatatttagtacagtaacatgctgtacagatttatagcctagaagcaatagattatactatgtagcgtaggaatatagtagactataccatttaggtttgtgcaggtacactctatgatgtttgcacaatgatgaaattgcctaacaatgcatttctcagaacatatccccattattaagtgatgcatgactgtaattgtttcctttgctttgtagatttttagtttgatgcaataccatttgtttatttttccttttattgcttgtgcttttggggtcatatacaagaaattgctgcccagaacaatgtcatggagctttccccctatgttttattctagtaattttatagtttcagatcttacatttaatccatttggggttgatttttctataagggatgagataagagttcattttctttcttctttatgtggatatccagttttctcaacgtcatttattaaagagactgtcctttctccaatttgtgtttttggtgcctttgtcaaaaatcaactgactgtagatgtatgggtttatttctgggctctctatcttattccattggttgatatgtctgtttttattccagtaccatgttgttttgattactgtagctttgttatatatattgacatctggtagtgtgacacctcctgctttgctccttttggtcaagatcgttttgactatttggggtcttttgtggttttatattaattttattattgttttttgtatttctgtgaagaatagcattttaattttgatagggatggcattgaatctgtggatcgctttgagtctttgtatacatgtttatggtatatttagttttttaggcctttaagaacttattttagcaatgttttatacatttcagtgtacctgttttattatttcttgtagtagtagtagtattagtagtagtattcgtagctttttgtagatttttcaagatttttaatatgcacaattatggtgtctttgaaaagagacagtcttacttctccctttcttccctatatgcttgttatttgttttccgtgccttgttaaactagctaggacctccaatataatattcaaaagaagcagtgagagcaaagcagtgagatcagacatcctcaacttgcttctattattagtgggaaggcattcagtctgttaccattaaatgtgatattatctcagtggttctcaatgagtgggggatcttcacccaccagaggacagttggcaatgtctggagacattctttgttgtcacaactgggggctgttattggttttttaatgagtagaagctcaccagagcccctcttccaggcctagagccccttcatgttttactaactctggcaccaaaactcaattgatcgcaaaaactgatgggaacgtatatgaaactacttatagtcttgatccaaccttaggatattcataagttttactgctaaatattaatttgttcaattacaaaatgttatgtaacttgtacagtatataaacctctctaaattctgattttcaaacagtatatagacataaggatttcaggatttcatttaagggtctatagagatgctgccaaacatcctacaattcacaggacacccactcacccagactctgcaacaagaaatcatctagcccaaaacgtccatagtgttgctgtggagaaactatgtactacctgtaggttttaagggatatcctttaccagattgaagaagctatctcttagtctgctaagagttttcatcagaaatggctatgaaatttatgtcagatggtttttcttctaattgtatacgcctttatactcatgtattctatgaatataaaaaataccttgatttatttattttaaatttttaattaaaaaagtttttgattttaatttttatgggtacatagtaggtatatttatgggatatgtgagatgttttgatacagacacacaatgcgtaataatgacatcatgtaaaatggggtatccgtcccctcaagcatttattctttgtgttacaaacaatccagttatactctcttagttattttatatgtacaattaaattattattgactatagtcatcctgttgtggtatcaaatactaggcattttctaactgttcttttttttttttttttttttttttacctattaaccatccccacctcctccctaccacaacctcactacccttcccagcctctggtaaccatccttctactctctatctccatgagttcaattgttttgatttttaggtccccaaaataagtgagaacatgcagtttgtctttctgtgcctgacttatttcacttaacataatgacttctagttccatccaccttgttgcaaatgacaagatctcattccttttatggctgaatagtactccattgtgtatatataccacattttctttatctattcatctgttgatggacacatggttgcttccaaatcttggctcttgtgaatagcgctacaaccaacatgggagtgaagatatctctttgatctacttatttcctttattttgtatattgcattagttggggttctcttagagggacagaacgaataggacaggaagcatacagcatgggagaaagatgtaggctgggaggctaggcccatctctcattttcatgtttttctgcctgctttatattcgctggcagctaattagattgtgcccaccagattaagggtggatctgccttccccagcccactgactcaaatgttaatctcttttggtgacaccctcagagacacgcctaggagcaatgctttgtatccttcagtcgaatcaagttgacaactcagttttaaccatcacaagtccaccccttgtcaacttgaacccatacacatctcctgggatcatacataatcttcaaataaagacaataataaggtcataattacgcctaacataatacagctatccttcatacaaccagaaacacaacaatccccaacccaaatactattacataaagttaacatacttaaatgctgatatgaagtcaataaatcgtacatcacatgataaaggagaaaggaaataaaatgaagatattagtacaagtgtgtacatgcacaaacatgtttttaacaaaagaaagaggaaaggccgggcgcggtggctcatgcctgtaatcccagcactttgggaggccgaggtgggtggatcacctgaggtcgggagttcgagaccagcctggccaacgtggagaaaaaccctgtctctactaaaaatataaaaatgagccgggtgtggtggtgcatgcctgtaaccccagctatttggaaagctgaggcaggagaatggcttgaacctgggaggcagaggttgcagtgagctgagatcgcgccactgcactccagcctgggcaacagagagagactttgtctcaaaaaaaaaaaaaaaaaaaagaagaaggagaaatactcatgacaattagtccccatttctgtagctggtcacatggttgtagctaatattgatgattaccttgttctactacctattctgtattccctttgccttcagcaagcagcttagcaggtcgtggttttttttcctggtggagtgacccaaaccttccttcctgaagggtctgggccatttgtagtcctatctggattgcattgttgtagtttcccattgaccttaatcacagagatggtaataccctaatggatctcctgtattccatgcatactctttcttacctccgttatggagtagtacactgaattcatcttgatagtatgggtcagtcaccccagccaacactgtaactcccttcttagcttgttgacttaaaggtaggaggggcccaaagtgtccaggtggcaatcttgacttacggtttaatggaattgttgttgtgtctcctggtggcagctttcctccctctggaactaagacctctaggccagtagaacgtaatgttgtgggaacaggaagcaaaaattttgctagtggatcactaggggtgatggtgagtgctgccacttccacttccaccccttgattcctggacctgtgaatcctggctatggagaaagagtaccatatattggatgctgattcagatcacacacagccttctggagaactttgcctcagctctgcaatgtattgtcacctagttggcattgtatttgtgacttcaaaaggccattccaccgttctatcaatccagctgcttcaggatgatggggaacatggaaagaccagtgaattccatgaccatgagcccactgccacactgctttagccaaaaagttagtgccttggtcaggggcaatgctgtgtggaataccatgatggtggataaggcatttcgtgagtccaaggatcgtagtcttggcagaagcattgcgtgcaggataggaaaacccatatctggagtaagtgtctgtttccagtgaggacaaacctctgccttttccatatggaagaggtccaatataatcaacctgccaccaggtagctggctggtcaccccgaggaatggtgccatatcgagtgctcatttttggtctctgctgctggcaaattgggcactcagcagaggctgtagccaggtcagcattgatgagtgcaagcccatgttgctgagcccatgcataacctccacccctgccaccatggccagggcccattggtgatgacaggggtggctggggaaagagactgagtggtgtccacagaatgggtcattctatccatttgattattaaaatcctcctctgttgaggtcacctgttggtgagcaatcacatgggatacaaatatcctcacagtttttgaccactcagagaggtccatccacatacctctttcccaaatttctttgtcaccaatttcccagtcatgctttttccaagtccctgaccatccagccaaagcattggctacagcccgtgaatcagtatacaatcgcacatctggccatttctccttccatgcaaagtgcacatccagatgcactgctcaaagttctgcccacttggaagatttcccttcactggtgtccttcagggatgtcctagaaagggaccgtagtgttgcagctgtccactttcgggtggtgcctgcatatcgtgcagaacgatctgtgagccaggccctggtcttctcttcctctgtcaactgatcataggaaactccccatgacaccatcattgcatgctggggaagagaagacagggtggcaggagtgaagaccatggtcatttgacccacttcctcacgtaacttacttgtaccttcaggacctgctcgagcccaatcacgtatataccacttccatttgatgatggattgctgctgtgcatgaccactttatggctagatgggtcagaaaagcacccagtttatgacaggcagtttaagttgcacagtggcttgatgacccatagtcaaatgttcagtttccgccaaagcccagtaacaggccaagagctgtctctcaaaaggagagtagttttttgcagaggatggcagggtcttggtccaaaatcctagaggcctctgccgttactcacctatgggggcctgccaaagggtccaaacagcatccctatctgccactgatagctcaagcacaattggatctgctggatcatatggcccaagtggtagagcagcttgcagggcagcctggacctgttgcagagccttctcgtgttccggaccccactcaaaactggcagcctttcgggtcactcgataaatgggcctgagtaactcacccaaatgaggaatgtgttggctccaaaatccaaataggcccactaggcgttgtgcctctttcttgattgtaggaggggccaaatgcagcaacttatccttcaccttggaaggaatatcttgacaggtcccacactactggacccctagaaattttactgaggtagaagttcctggaattttagtcggatttatttcctatcctctggcatgcaaatgtctcaccaataagtccaatgtgtttgctgtttcttgctcactgatccaatcagcataatgtcatcaacataatggaccaatgcaatatcttgcagaagtgaaaagcaatcaaggtctctctgaataagattatgacacaaagccagagagttgatatacccctgaggtaggacagtaaagctatattgctggctttgccagctgaaggcaaattgcttcgggtgggcctcatgcacaggaatggagaaaaaggcatttgccaagtcaatggctgcatactaggtaccaggagatgtgttaatttgctcaagcaatgaaacacacctggtacagcagatgcaattggagtaaccacttggttaagcttaccataatccactgtcattctccaagatccgtctgtcttctgcacaggccaaatgggagacttgaaaggggatgtggtaggaatcaccacccctgcatatttcaagtccttgatcttggcactaatctctgcaatctctccacggatacgatattgttgttgacttactatttttctaggtagaggctgctctaatggcttccatttggccttttccaccatagtagccctcaccttaccagtcagggatccaacgtgggggttctgccagctgccaagtatgtctatgccaattatgcattccagaactggggaaatgaccacaggatgagtctggggaccctctggaaccacagtaagttggacctgagctaaaactccattaattacctgactttcataagcccctactttaactggaggaccacaatgacattttgggtcccctggaatcaacatcagctcagagccagtgtccagtagtccccgaaatatctgaccatttccctctccccaatgcatagttaccatggtaaaaggtcagaggtctccttggggaaggatgggaaaaagattcactgcataaattgttggtaatgtagtggggtgcttcctcaaggggacccagcctccccttcattcaaggggttctgagtctgtaaactggctcaagtctggaaattgatggaggggttgcgattctctgtttttataattcaaattaggcttttgtctattcaacctagaagttttctctgtataatttaagtaggaatgaagtaggcttcctatcagtttcgcttctaggaacactgtgattgattagccaatgccagaactctacatgagtcagactatgctgattgctgcttcgcttttgctgtccattacggtaggtacacccaccttgcctttggcggttgagtaccaccacttggccgctgccacctcaggatccaattattcccatcgaatttaaattttgtagttgagtgactgcagttcccaccattagatctgacatacagagatgagcaattacagggctctttgaagatgcatgttctgccctcacaaatctatttcacaaggcattggtcaagggtatatcttctggaccctcccagctgggatgagtaggtctaaaatgactaatccactccaccatcccaatctccctaagcctttagatcccttcctctacataaaaccaagggagatcaggcatttccatcttgctcacagtgggccatcttttaatccatatttcagctaaccaagcatataaactgttagaaccatttttaactccccgagctgaaacactgaatgcagagtccctaagcagtgggcccaaatcaacaaattcagcctgatccaactctgtgttccttccaccattatcccatacccttaatatccattctcatgcctgttctccagattgctgttcttatataaatcacagaactaaaacagttcttttctagtgtagtgcacctcctcatgggtcacactctcaaactcacctctagtggccgctgggactttaatctaattataggtctagaagcaaatggaggtgttgggggtagcttctgaagagaatcaacattatcttgcctggcaattgcctcaggggaggccatcactgttgcttcaggcagtgtttatctccttagacaaaggtggaaaggctgatggcagcatgggtcagggaggggatgttgccactactggggatggggaagctattccttctggcaaaaaaggttcatcagagtttacaaactcagtgtccccagctttatcagggtctccccacacatccccattccaagttgcagggtcccattattttccaatcaatgccctcactttaacagtagccacctggagaggctgtgcatgcatctttcattgcaggccagtcactcacataagagcttgtgtatgtttttccacaattttagctctttctctacaagggcgaagactctcactcaggacaatcttagcagatttgaggctcagtatctccttctgaagccaggaggcagaatccctgagttccttattttctttcatcactttgtcctctgaacttaggagcaaccaactggcttcattatgttccttggttctccacataaggtcaaatgtattatgcatagagtcactaaattctttgccactcatgagtggtgaatcaagagtgtcaaatgcatttattttgcataattctctaaatagttcatgccaaagactatcattgttctccatactatttgaagtagagtccttagcattttggggtctaatcatattaagcagccaactccagaaacctccaaaagaactccatccttaatattctgttcctctagaaccactcctcgtaccagaatctgtattagtcaggattctcttaaagggacagaactaataggatatgtgtgtgtgtgtgtgtgtatgtgtgtgtgtgtgtgtgtgtgtgtatgtaaaggggagtttattacgtattaacgtacatgatcacaaggtcccacaatatgctgtctgcaacctgaggagcgaggagaaccagtctgaatcccaaaactgaagaatttggagtctgattttcaagggcaggaagcatccaggataggagaaaggtgtagactgggaagctaggccaatctctccttttcaggtttttctgcctgctttatattcgctggcagctgattagattgtgcccaccagattaagggtggatctaccactgactcaaatgttaatctcttttggcaataccctcacagacacacccaggatcaatgctttgtatccttcaatccaatcaagttgacactcagtattaaccatcaaagatgtctacctaggagtggaattgctagattatatggttgctctatcttgttttttgaggatcctccaaactgttttccatagtggttgtactaatttacattcccactgacaatgtacaagtgttcccttttctccacatcctttccagaatttgttattgcctgtcttcttgataaaagccattaactggggtaaggtgatatattattgtaggtttcatttgcatttctctgatgaacaatgtttagcactttttcatatatctgtttgccatttgtatgtcttcttttgggaaatgtctatttagatcttttgcctattttttattcagattattagactttatcttgttcagctgtttgagctccttatatattctggttattaatctcttgtcagatgggtaatttgcagttatttctttcagtctttgggttttctattcactttgctgatagtttttttgttttttgctgtgcagaagctttttaatttcaatatgtcaattgcattttcaactctagaatttctgcttgattcttttaaattatttcaatctctatgttaaatttatctgatagaattatgaattccttctctgtgtttgaattttttgagattcctcatcacatctattttgaattctctgtctgaatggtcacatatctccatttttctgggattggtctctggtgctttatttagtttggtgatgttttcctggatagtcatggtgcttgtagatgttcatctgtgtctgggcattgaatagttaggtagttattgttcacagtttgggcttgtttgtacctgtacttcttgggaaggctttccaggtattcaaaagcacctggctgttgtgatttaagccgtatctgcattagggaacatcccaagcccaatagtgctgtggttcttgcagactcgcagaggtaccaccttggcggtgttgcataagatccagaagaattctctggattaccaggcagagattcttgttctcttcccttatttgctcacaaacaaagggaatctctctgtggtgagccacctggggctggagatgtgttgacacaagcacccctgtggccaccacccctgggattgtgctgggtcagacctgaagctaggacagcactgtgtctcatccaaggctcaatgcaacgacttcttggctaccacctatgtttgtgcaaggccctagggctctatagttagcaggtggcgaatccaggcttgtgtccttcccttcagggcagcgggttcccccaggccccaagcaagtccagagatactgtcagggagctagggactggaattaaaaatctttgcactctacctggtgtgttctattttactctagcagatttgaccctcaatccatgaggcatagtctttcccactcttctctgcccttatcacaggcagaggagcctcacctcatggtcaccaccaccacaggcccacggggactactgccaggctaccatctatgttcacttaaggcccaagagctcttcattcaacttgtggtgaatgctgccaggcctgggcctcatgtttcagggcagtgggctccccattgtcccagggcaggtcccaaaatgctgtgcaaaagccaaggcctggaattgaggaccccaagagccctcttgttgttgtaccccactgtggcagagttggtacctaaagtgcaagccgaagtcccctttacttttccctctccttttcttaagcagaaggagactttcccaatagccaccacagctgggaatatattgagtcttacctgaagctagtgtatctcagtcttacccaaggcccatggtgtactacctgggtagctgggtattgctactggttatttagggctactggttatttagtctgcaggtgatggatcctgccaggacttggcccttctcttcaaaacagccagttcctttctggcctggggtgtgtctggaaatgtcacctggggattaggacatgtaatggagtcctcatgactctgactggagccctatcctactgtgtctgagctagtaccccagacacaggcaaaactcctctttactcttccctctcgtctcctcaagtggaaggaagggatctgtggtggacgagtgatctttgcagcctggggttgagggagcggtgacacaagcattcccttagctgcaccaactggtgtctcagtaagtcgtgtgcctccccacccccaaatccactgtctccaagcccagctcagcactgggacttgcagactttgtggcctagattttctttcaagtttatttaatgtcccagagcaatttagcctgcagtggtgagccttgctggaactcaagttctagtcacagggatgggtgatttcctctgactagggctggtttgaatgctcccactgtaggcgggtgtcagctgtgttcagccttgttttgctttctgctgtgacagggcagcattgaattcaatgcaacatctcactatcactgcagcctccttctcctaagcacatgtattctctctcagtccacatggctgctgccaatgggtggggaaggggtggtgtcagtgattcaagactcttttctaccctctccagtgcctccttcagtgatatgaagttaaaatcaggtactgtgagtgctcacctaatttttaggttttttttatgaagatggttttttgtgtagataattgttaaatttggtgttcagggcggggatgatcaatgcggccttttattctactatcttgctccacccccaattgattaagtttcaatttatttatttattcaaatagatttttgcggaacaggtggtgtttggttatatgaataagttctttagtggtaatttctgagattttggtgcacccatcacccgagcagtgtacactgtactcaatgtgcagtcttttatcccttacacccctcccaccctttcccatgagtccccaaagtccattgtatcattcttatgcctttgcgtcctcatagcttagctcccacttatgagtgagagcatacaatgtttgattttccattcctgagttacttcacttagaataatggtctccaactccatccaggttgctgccaaagccattatttcattcctttttatgactgagtagtattccatgctatttatataccatattttctttatccacccattgattcattgattgatgggtatttgggctggtttccatatttttgcaattgtgaattgtgctgctgtaaacacaagtgtgcaaggttttgttttgttttttctgtttgtttttgcttgtttgtttgtttgttttttgtataatgacttcttttcctctgggtagataaccagtagtgggattgctggaaagaatggtagatctacttttagttctttaagaaatctccacagtgttttccatagtggttgtaccagtttacattccccccagtagtgtagaagtgttcccttttcagctgggtgtggtggctcacgcctgtaatcccagcactttgggaggctgaggcaggtgatcaccggaggtcaggagttggagaccagcctgaccaacatggagaaaccccatctctactaaaaatacaaaattagctgggcgtggtggtgcatgcctgtaatcccaactactcaggaggctgaggcaagagaatcacttgaacccgggagatggaggttgcggtgagccgagattgtgccgttccacttcaacctgggcaataaaagcgaaactctgtctcaaaaaaaaaaaaaaaaagaagaaaagaagaagtgttcccttttcagcacattcacaccaacatctattatttttttatttttttttaattatggccattcttggggagtgagatggtatcacatggtggttttgatttacatttccctgatcattagtgatgtttatcattttttcatatgtttgttggccatttgccaactgatatgttttcaaaggcaaaataattaaatgagattgtttattccacttaaacgaattcaaaaataatgacttacaaagtagtaatataattccaccgcccatgtgtccaaaatgttgatttatttatgccagaatgttgtttctctgaccaaatattgtcttttggagctggaggatctccaaaagggaaagctcttatagctaatcaagaagtttcagtggggaaacttataataccatgaactaagcatcagcctgattagctactgattttgtgactgaaataaaatggtacctttcgttcttaccctgccccaaggtgttttttagacaggggaaattaggtgtaataatttcctctgaaaggtgagttatgctacttttgattatttttctttttacttctttgtattttttcctcttacatttatttttgattaggtaacacattcatgtggttcagaatttgaaatttacaatagagtgtacaattaaaggtctcacattctttgtgcccacccccacagttcttcccagaggcaaccagtgtttttacttttataaatattttatgcatacacaagcacaggcacttgcaaacatgtgcacacattcttccccccagttgtttttacacatttttctgtactatgctttagagcatttcatatcagtgcataaggagctatggctacatggtattatttgtttgtatagagatgacataatttatttaacaagtcccctattgagggatgtttaatttgttgcctgtcttttgctattgcatttctgcagtaagtaatcttgtaatacatcatttcagatgtgtgctatctgtagggtgaatttctagaaatggagctgttgggttggatagtatggacccttgtcattttggtagatattgccagaatgtcctctatagaagttgtgcccaatttacactcctaccagcaatgtataactgtgttttcctaaccctcaccaacacattgtattatcaaacattatatctttatgaatatgatatgtaaaaaatactatgtttttaatatgcatttctgttctgaataaggttgagcaccttttcatatatttaagatcctgtgatatttataaaaataatttccttttttataatggctggaatgctgcaggattgataggcacaatgtcttttctccttaacttatacctgcaggtatattcttttacacagcagtatgagagtgattccaaagagcatatttaggttaaataaataatccaggaacactttgtgttttaaaatttcggtagcattttataattcactcattatacaactaacatattatagttgacaaacaaatgaaccaacatcccctagtaactttaaatgatttaaattactcaagaaatttaactcagtggttttgttacttcttaatatacaccatactttataattttttcatattccaagaaaaatagaattatcctttatttaggaagttaccagtgtgttagaatttgcacggagttatcttaaattatggtctgtttacatttgcaatatgtatttgaaattttcttccttaatacctaagccacattgcaggaaggtgagaagttcagtgtatatttaaatgtgttgactgattcataaatggccccggactcttttgcatcacacaacaaatttttgtcagatctttgtctatggcactgtagatcacctctattatagcagctatcaaagtctgtcatgtattgtcattatttatttatgtgtctgcttttgtcactagattatgaacttctagaggatacaatttgtattcccctctagcactggtctggagctttgcatatatttcagacttataaaatgtttgttgaactgaattgaatcacatttatatagaggttctgaggttgccttttaaaaaacgtttttccacgtattgtttgcttttttaaatgtaaagtcttattttaataccgcccaagtttgctttctgctaatattattgaatttgtattgagaataattattcaaaatactcctgtaataatatcagtgaagaggcagatttttattgtgcatatttcctagctgttcatagttttaaccatcagagtcctgctttaattttagcctcaggcaattctaaatatttagtgagcaaagtgggaatattagacactttagtgcgggatgttatttgtttcatctcactaagattcccaatttatataggccatttgaaatgtgcaattaaagttctggtcattgctaatattaaggaatttagaaggttctatagcagagtaaacagctttacaaatgatagtggtgttttttaatttaaatttttattgagatatttgtggattcatatgtagctctaagaaataatatagagagatcccttatacactttatgcatttctccccagtggtaacatcttgcagaacagttgcctactatcataaccaggatactaatagtaatataatctgccactctatattcagatttcaccagttttacttgtgttcatgtgtatgtgtgttctgtacaattttattacctatatatgttcatgtttccaccaccacagttaaaatactaaacagttccaacatcgcatatattcagaagtatgctatctgtagggtgaatttctacaaatggagctgttgggttggatgtttgtacctttgtcattttgatagatattgccagaatgtcctctatcgaagttctatcagatttacactcctaccagcaatgtataactgtgtttgttttcctaaccctcaccaacacattgcgttatcaaacattgcccttttataaccaccccctgacccctatcatcctaaatcattgcagccactaatctgttctccacttctaaattttgtcatttaaaaatgttatttatttagaataatgtagtataaccttttatgattagccttttttatcattatcaagtattatgtactttgcataattgtatgtgctatactttttaatgagtatttttatgtaaatatttaaaaatttatcttattttaggtttgggggtacatgtgaaggtttgttacacaggtaaacacgtgtcatgggggtttgttttacatattattacatcacccatgaattaagcttagtacccaatagttatcttttctgctcctcttcatccttccaccctctgttctcaagtagaccccagtgtctgttgattccttcttggtgttcgtaagttcttataatttagctcccacttataagtgagaacatacagtatttggttttctgttcctgcattagtttgctaaggatgatagcttccagctccatctgtgttctcacaaaagacatgatcttgttctttattatggctgcataatattacatggtatatatgtaccacattttctttatccagtctgtcacggatggggatttaggttgatttcatgtctttgctattgtgaacagtgctgcagtgaacattcatgtgtgcacatgtctttatggtagaatactcatgaaagtgtcttggagctatttggacaaggaattttaggatcttgggtactcaaattatgatatggaaggggaaacacaggctttcagtggttctttcccttttgccccacagactcttcctctctgaaactgacagcagctgaggaatggctagagtggggtctgctacattggagagcatctcttgtccatgtcaaagtgtgacgcttcatttattaattgtttgctatgatttaactactaaatgctattttaatttttttggcttgaaaataagtcttaagatgtcatcaagcttgatgccagcaaatatggcagagtagggaaccctcaaaatttatctttttttacaattgcactaaataaactggcaaatactctcagaatcaactttactggcattatggaaactaatcaaaagtttacagcaaccagacaaatgcttaataataaaaaaagttgaatctcagtaggagagatttgtggcattttagcttacccttgtcccaccccctgctctctagcttggcagtggctctgaagacaacagtctacatttcactgtactagtccactgagtacaggttcttagtacctgagggagtagaagtaaccttattcttaaataagtgtgtttgttggttttgatctgtgttgtggatctgagggaccagttcagaaggcttgcctttattttgcctaactcagaacttttccaaggttgaggcagctatgggggtggaggagagatttgtgaaaacatttacaggcaaatgtattagctgctacttcctaggggtagggataaaggttggtcaaacagtaaactagctaaaaagcttgggaaaaaagtctgggaaatgagatgctttggagaattagagctttgaaaagcttcaacatattcctggtaatttcgaaggccatgtgcccccaaggctatgtggatgctcagaaaagacctgagaacgccctaagctttcacctctggcttatcttcagggtctcaactagcaggaatttaaggctaatgcagaatagtaaacttcctggctgagtgttgaaggtgtgcacatctgcaaagactgggaatttattgttgttgttgttccaggcgttttaggaaatttctgtttcaaatcactagatgctcactacgataatgaaacagatttcagtggccacacaacaaagaatacagactttacaaaattagtttagaaaaagtcactaaacaaacaaacaactactataataagcatcaataacaaaccctggagagggaagagaatctgattttcagatttgctgcatcataatattcaaaatgtcctatcttcataaaaatatgaaccatgcaaattaaaaagaaagtattacacataggaaagaagaaattactataattccccaaagaatcccctggctgtagtatgggagagtcattaatctgctatttagctaattgaacaagtaaaatggacaaatcgaatattgagcactactagaggatccccatttactagtaaaacatgcttttatagagatggatagctgttccaaaaatgtctggccatttttattgcattataaccttaagttaaattttagttttcattttatcttgtgatatatgatatatggaagctaactcatttcctatgagcaaatgaattgatgagttttgctcaactgcagaaaatcattgagtcttttataggattttttggtctctgactttagataaaatggtatgtatgaactctttcccaaatagtacctggatctgctatgtttctctttctaccaagcagatagcctaattctcaatgcctggctgtctcacttgtgtcttgtgctggatatttttatttgctgaatattatgttaagtacagttgactatcattttcatctttataaggaaatcattgtatagctatattaaaaaatgagtagtttttatactgttttaactatagacccttagtggttataaagacttagcaaagggccaaagagtttttaaaatgatatatttataagcaagtatagagaggaattcaataagtgagtctggcattgtgcatctgttttagagatttcattcattagaaaatagagaacaccatggggaaagactctcaattttattaactaagtatggtccatgcatatgaagcgacttcagtagaataagttcaaaggaaaaatgaatgatgtcaaagagaaaagtaataattttacttcataagttgccaactcaggtagttgtcatttaggaaatatactgggacagcctaaaggtaagttaacttttttcttaattaagccttctttgaagaagttaagtttagtgagtaagatgcttcttttttataatggtttttatttacatatctcatgttggtgaatcatgtgttagtagaaatcataagggaatagatatgctgctatttaacttcagttctgttttttcaaaaaaataataaattaatggataatgtagcttctcacttatacaggggttacagggacctaattcttggatctacatagccatcaactgtagtaccatatttctcttgagggagctccccaaatgaatgggagagttaaccagcatttatatggcttaccttgtatctcaaatctaaaaagaaaaaaaaaaaaaaacggatgtagctaatggtatcttttaaatgttctttgacatttaatcaattttcactcttaatggttctgtatatcttattttgctcggaaagggtcaaagccatgcctgaaagaccttaaaataaaatgttaaattttgactatgctttggtaactttgtttattttgatattgcctgatgcacagaaaatgataaaaatttccataagaaaatagattgcaactatttaagtctacaatacttttccttgtttttataaattaaaatttaaatacaattttaagtctattttttgacctaaacaattgtaatactgagttctttgtgtatttcttaagaatttctttgcaggtccaaacagatctagcattattgagactgaataaaagatgcttctttcaggtggcccctaatttaattgtttgtaatgattattctagaaaaaagcaccactctgacacatggattttcttgtaggtcagcattttataaaaagtatcctaacgacaaatggatgataggaagagcaaaagaggaaaaaatatccgtaagaaaagatgtaatacaattagtacaaggggcaggaggtaacaggaatttggttcttctttctatatttttttactttgagttcctcaaatattttatatgcaagaaaatatttcaagttttaacacatatgtcataccattttcttagtttgtattccatcatgccataagcatttactttcagaaggacttttggttttataaattaaaggcctgattttttttttttcagtgcacttctaagttagataacgcagagggaggtttatgtggaaatgatcgtttttctaagtgaatgttcaaacactgagtcactcacaagttcttaaaatcctatatgttttaagatatattagaggcagattctatactgaagaaatagtgcaaattttgcgcagttaacataaaatttagcatttttcatcctcccattatcttcagccccatgattttgtgtctttggggatgaatacttagactttcacttgatgcattcaggctctgggttagaaaaagatgcttaaagactgagtcatgaatattggaaaagaatatagtgggaggaatcactctacatgatattatgacctactatatagctgtagttaattaaaacagttgcagtagtagagaaggaatagacacatagatcaatatgatagaagggagaattaagaaatagacctttacaatatgcccagctattttttgacaaaggagcaaaagcaatttaatagaggaagaataactttttttttcaacaaatgattctggaacaattgagcatccatagacaaaaatatgaaccttgacctaagcctcacaccttacaaaaaagttaactcagaatggatcatgggtttaaatataaaaagaaaacaataaaacgtttagaaaaaaataaaatcatcacctagagctagatgaagaattcttagacgtaataccaaaagcctagttcatgaaataatcaaaatttaaaaatgtttattctgtgaaagtccttgttaaacagagaatgaaaacactagctataaacggagaaaatatttgcaaaacacatatccagtagaagattattatttagaatatatatttttaaaactcccaaaactgatcagttcaataaaacccccccaaatcccattagaaaatggacaaaagatatgatcatacatttcatgtaagaggatatacatggaaggaacattattgggaaattggtgacaaagaaatttggagaagagatgtgtgaatagacctccctgaatgggcaaaaaacatgaagataattgtgtctcatcaaagggcaacctcagcagaggaggattttaatagccaagtggataggatgacccgttctatggatatcagtcagtctctttcccaaccactcctgtcagtgcccaatgggctcatgagcaaaatggccatgatggcagggatggaaattatgcatgggttcagcatcctggacttccactcaccaagaccaaactggctatagccattgctggatgtccaatctgccagtagcagagaccaacactggtagcaacaccagatgaggcaacattgcctggagtgatcagccaactctctggtgggaggttgattacatcggaccccttctaccatggaagaggcagcgttttgtctttaatggaacagacaatcgggatatggatttgccttccctgctttgcagtgcttctcccaaaactgtccatgaatggcttcattttgttttttcctctccagtttctcaggatgtagctttagattattgaattgagacatttcttctaatgtatgcatttaatgtaataaatttccctctaagaacattttagctacacaccactcatttttgacatgttatgttttcgttttcattttaatttactcaaaacagtttttttcaataattttactttgactcatatgttaatacttggaagtgtcttgtttcatttgcaaacatttgaggatcttctcaatatcattctcttttttgatttctagttcaactctattatgatcagataatgtactttgtatgattgctattttttaaatttataatttttttatgtcccagaatatgttctatcttggtgtgtgttctatatacatttgagaagaatgtgcattctggctggatggaatattctatatcaaattggttgatagtattattcatatccttactgatttcttcatattttttctgttaattactgagagagaactgatgaagtcacaaaatatagttgtgtgtttgcgtttttttccttttatttctgacaggttctgcctcatgttttgaagctctgttagttgtatacacattcaaatattatgtcatcttggataatcgatccctttattgttatgtatgtttcctctttctcttggattatatttcttattctatagtgtcaaaaattaatatcactattacaactttgttttttgatagtcgtttctttttgaaaaaagctttattgacttgtgattcaccaatttaaaatgtataaatcaatgtttattagcatattcacagagctgtacaatcatactcacagtctaaattttgagcattttaatcactccatagagaaatcccataccctttaccagtaactctcccgtaatcccccaaatcttggcaaccactaacctactctctgtttctatagatttgcctattctggacatttcgtagaaattgaattatacattacgtggtattttgtgattagtttctttcacttagcagaatgtttacaaggttcagccatgttgtaacatgaatcagtattagattcattttcatcactgaatcacattacattgtatggatataccacattttggttatcggtttataagttgatggacattcaagttgtttcctcatttggctattagaaataatgctgctatgaatatttgtgtaaaagtttttgtatagatatatgtttttttaatcttgggtatatacctagaagtagatttccacgtgatgtggtaactctatgtgtaaacatttggggacctaacatcctgttttctaaagtgactgcatcattttctattttcaccagagagcctggtggggttcctggagaaggctgttagagagtgtgagttcctctatgtttgtgggccccagaagtttcacattatcttattagcccacacctggcctttagcaattagttgaaatgtctaattgaatcttcctacctgcttgtattctgtattgcattctatattgtcattcaatattcaattttcttataagtaaggaaatgctctggacctatttctctctggaggttttgggctgattctttgctgtgatctctattatctctgataggtccaagaaaaattgttactctgaaacctgcttgacttttttcttattgcaagtttaggagtaacatctttctagctctctacatcttcaagctaaaaaatgtcatttaataatgagtttacctgttttttatatattatggataccagttctttattatatgtacatttcacaaaagttttcttccagtttgttgctggcttattctttttcttaatgattttttgatgagcaggtgttttacattttaatgaatctagtttatcattctttcttttattatttgtgctttctgctgcctaacaaatatttttctatgccaaggtcacaaagctgtttcctgttgttttttctagaaactttaaagtattttatatttaagaacatctttgatcttgaagtaattttttgaatggtgtgaattagaggttgacgtttctgttttaaaatatgggtatactgttgtttcatcaaaatttattggagagatttcctttcccagtgaacttttatgttaccattttcaaagatcatttgactttatttgtctgtgtctaattttggactctccattttgtttgtttgacctgttcattcattaataccacactgtcttggtattgtatagtgagtgttaaaataaggtagagtaaatattaaatataaatattaaaacttccttcctcttttcaatattattttggatagtttatgttctttccatttctgtataaattatataatcactttgtcaatttttacaacaatatctctgatgattttgatgggtgttgtagtgaatctatgggcaaattttgggaagattgttaactgaagaatatttcatctccagtatatgagtctagcatatatttccatttacttgataggtatatatttactttacattacatttaatatttctcagcaatgtttttatcattttcatagcataggttttgcacatctttcactaattttatctctaagtaatttatgactttggatgccattgtaaatggtattagtataaaatttttcattttataatgataactgatttactaacttcagttttataatcacttttatactgtgagtatacaaaatttacttgtttaaattttatggctttttaaagattacttagaagtttctacaattaataatcacattatcttcaaataagagatgattttgctcttcccttttcaattattttgcatttttccttatctaattgcggtggatgagctcaatggcaaatgctaaataaaagtgatgagataagatatttttgtctgtttcccaagcataaggaggaaaaacttcagtatttcactattaagtattatgcaatatgtatgtattttacatgcacatcatcagattgaagaagttccctctatttttagtttggtgacaatttttatcatgaatggatattgaattttgttcaatgatcatataattttacccctttaatttgttaatgagtaagttttatttgttgatttttattgttaagccaatcttgcattttggggattaaattctatttgagcaagatgtagtatccttttaatatgttgttgtattctatttagtaatattctattaaatatttttggatctgtgttcttgagagatatttgtgtataattacattttcttgtaattcatttatctggttttcatatcagtgtaatataggcctcctaaatgagtttgaatgtgcttcctcttccttcattttccaaaaatgcatttgtagtattggtatttttctcttaaatatttgattgaattaactaatgaagctgtcttggcctagatttttctttgtgcaacagtacaattttgtattgtgtttatttaattaacgttttatcatgggcacttttctatttcattaaatatttttcaaaaccaagatttttcagttacataatactcatttgaataaatatactgtaatatatgtaactagtcccctacataactgttactttttttctcaaacatacgtctgtgtgtatgtgtgtatttgtatacaaacatatgtatacgtttatatataatatgaagtatgcataatatagtatattgcatacatagtatacatacataataaatacatgtatgtataaaaatgtacatatgcatgcccacacacatagacccactaagagaggcagacagactgatggactctagaattagatatatcagtacattaacagagtttaactttggatgttgggagtttgggcactttttactttctttcacagttttcagtattcctattcttttcagaccaagagtgttactctataattagaaagtaaatacctgaactgttttcattcttgagaattaaaaaatggataatttcttaagctagcacaggcaggtagggaaattaccaaaatactgcgtggtaattaaaattatagcaatgttcatgtttgtgatccccaaccacccaagagcggaacattaaatgatgtcggaggaggtgcagtctttcaggctcccatgagaattgccaaatggggcacttatgctttttgggacgaggtccaggttttatttttttcttcttcaaaagtcttaaaataaatgaaaattgtcacagcaaaatgcattttccctttcatttagagcattgaaggctacgcaacgtcaggtgacactggaagaatttggcttgaatttttaaagttgcttgataggggaaagggagatgaaaattactttgaagaattatctagtcacatttggttaatgtgggcaatgatagaataaagtaaaaattttagacatgtaatccattgtgatggctccagtttttcaggacaattaagaaatagcctctattgctcaaagtctcaagaaatactggaaaaaaatgcatggatactttattgggtgcttgttaaattattaaataggtgacaacttaggggtgctggctaaactttttaacttcttgtttggccttgtacagtttataaattttagaagtaacactgagaggacagaaaatatctagaagactttttaaaggtgcatacatatatatacacacatgcatttcagaccaacgagtgagggatgagtatggcaggaggagtggggacagaggaccgaagaagaatgagaggatgttgggaggtggagagagagataagaaacaaaataattagagaaaaattaaaaggtgtatttattaggtatagggtgaaaaaatttgcctaattcctgaatttggatgatttcagagtgttcttatctggttctgtacccaaaataatttattcttagggattctgtgagggattaaatgacactagagacaaacgatgaggcaatgagaaaattatgaagaaattaaggagaagagcaatatcttcttatttgctataattcataatacatggatgtttgagaatcactattatctagtgtataaggctgacttgttcccattatttcctaatccataatgctgctccttttttaccccataatccttcccttaaaccacatgtgcatcatttctttcatctggaatggatgtcttgtgtttcaaaaatgttttaccttatcactcttattttcacttctgaactaaaggtacattgcttgtataaccccctttttgctgttttgataaggtactaaattgaataatgtacctttaggccagagagcagtatagggcaagttacttagtttgtgagagagcctaggcaaccgattgctgaacagctattatctccttgtgatttcatttcctttgctcattattaggcacactataagtattgtgatattttctttggaaaattttggtcctaatcagaaagccatctgctaacaattgtgctggaagtgaagcagcatgataaagttacctttagccatgatatagttgtgtcaatgacctttcagttacatattactattatataatttgtggggaacatttcatgtcttagtgctttttgtaatgtgggaatttggcagtttgaaaatgtatggaaagcactacagttattgactcttttttttggtcatccaagtttcattgggttcttcatgtttctttatttcccttagactatttgagaggtaggaaaccaagggagaaggaaatggactcttatggtggagcaaattgaagtatcacttctgcttttctttttttcttttaatccagatgtacagtaaacatagacaagagtatagactacagccaggttatagaacagataggtctcagtagtaggcagtatgttagctcagatatctgggtagtcaacatggttgagagtgtggtagctatcattcataggtgagttgagtgcaagagccagggtagctggtagcaggcaatatccagagatccaggtgaacattatagttctgacagtgggattggagttcatgttactatttttccacatcaggtatgctggaaggtaatagttttgttttgttttgttttgttttgttttgttttgtttttttggagatggagtttcgttcttgttgcccaggctgcagtgcaatggcgcaatctcggctcactgcaacctctgcctcccgggttcaagtgattctcctgcctcagcctcctgagtagctgggattacgggcatgcaccaccatgcccggctaattttgtatttttagtagagacggggtttttccatgttagtcaggctattctcgaactcccgacctcaggtgatctgcctgcctcggcctcccaaagtgctgggattacaggcatgagccaccgcgcccggctactggaaggtaatagttttttgtgtagtccgttgcctgaaatttaaaacattttttttcatttaaaaataaagacaggcttagaaaatcacacacacaatatatggtttaataaattattaccaagtaaatacctttgtaactaacacccaggtcaagaaataagaactatgctacccaccccaaaagctccttttgtggaccacatcctaatcccaacccagttgctccacagaaataaacattgtcttgactttctttggactttttatggttttatcacccaaattcgcgttcctaggtattactgttttattcttgttcatttagaaaactttgatatgttttttaaatatctcttaaatgtgtgggttttccctctatcccttacttttctttacaattaatatttcgaagaacctatgccatctgacttacagagcatctcaccttttggattcttctgactgcaaattcaaggtgcagtttaacatttttttctgccatttatattttctacatattggcagctggatccagtggcttgatcagacttagttttgatctctggcaagattataagtggtgtctgacagtcatatatggggaagataatgggtactcgtctttctttttgtgatagtagtagctattggtgattaatgacaatattagttaactcagtttgaaaagtagtgatattcttggccaatatcatactgaatggggaaaagttgaaagcattcctcgtaagaacttgaacaagataaggatgcccaccacattcaccacttgtcttcaacatagtacttgaagtcctagtcagagcaattaagcaagagaaagaaataaagagcatccaaattggaaaggaggaagccaaactatctctcttagtcaatgatataatcttatacctagaaaaccctaaaggctcctccaaaagccttctaggcttgataaatgaattcagtaaagtctcaggttacaaaatcaatgtatacaaatcagtagcaccactatgcaccaacaacaatgaagctgagaatcaaatcaagaactcagtcccttttacaacagctacaaaaagtaaaacacctaggaatatatttaaccaaagaggtgaaagatctctacaaggataatgacaaaacactgatgaaagaaatcatagatgacaaaaacaatggttcatggattggaagagtcaatgttgtgaaaatgaccatactgtccaaagcaatctacagattcaatgcaatacctatcaaaataccaatgtcagttttcacagaattagaaaaaacaatcccaaaattcatatggaaccaaaaaggagcctgcatagccaaagcaatcctaaaccaaaagaacaaatctggaggcatcacactacctgacttcaaattatactataaggctacagtaatccaaacagtatggactggtacaaaagtaggcacataacaaattgaaaagaatagagaactgagaaataaagccaaatacaaccaaccgatcttctatgaagcagacaaaaatatacaatggagaaggactccctattcaatatatggtgctgggaaaattggatatctgcatgtagaagaatgaaactggatccttaagtctcaccatatacaaaaattaactcaagatagattaaagacttaaatttaagacctgaaactatacaattttagaagaaaacataggaaaaactcttctggacattgacctaggcaaataatttatgactcagaccccaaaagcaaatgtaacaaaaacaaaaataaataaatgggacctatttaaattacaagcttctgcataggaaaaaaataatcaacagagtgaacagacaacctacagaatgggagaaaatatttgtaaactatgcatctgataaaagactaatagccacaatctacaaggaactgaaacaaatcagcaagaaaaaatcaaataatcccatcaaaatgtgggcaaatgacatgaatagacatttctgtcttcaaaagaaggcatgcaaatggccaagaaacatggaatcatgctcaatatcactaatcatcaatgtaaatgcaaattaaaaccacaatgaagtgccaccttaccccagctagaatagccagtattaaaaagtcaaagaacaatacatgttggcatggatgtagtgaaaagggaacacttctacactgctggtgagaatataaattagtacaacctctatggaaaacagtagggagatttctcaaagaactcaaagtagacctaccattcaatccagcaatcccactactgggtatctgtctaaaggaaaataagttattgtatgaaaaagacatgtgcatgcatatgtttattgcagcacaattcaaagatatggaaccaacctaagtgcccatcaaccaaggagtagataaagaaaatgtggtatatatgcatcatggaatgctactcaaccacaaaaaaggaatggaataatgtcttttgcagcaacttggatgaaactggaggccattattttaagtgatgtaattcaggaatggaaaataaaatactgtatattcccacttgtaagtgggagttaagctatgggtacagaaaagcatacagagttgtataatggactttggacactcagaagtgaggagtcggtgagggataaaaaaaaaaaactacatactcagtacagtgtacattatttgggtgttggagtacactaaaatcccagactttgccactatacaattcatccatgtaaccaaaaaccacttgtacccctaaagctattgaaataaaaaaaaaactcaaagaaaagtagtgatattctaatgtaattttttttcatgtgttagttggtgttatggactgaattgtgtccctcaaaattcatatgttgaatctcaaaccccaaggtaactgtatatggagtaagaaagtaattaaggttaaatgaggtcataaaggtggaactctaatcaatattagtgtccttataaaaagagacaccagagagttcactcactccctgccatgtaaagacgcagcaggaaagcaggcatctgcaagccaggaagagacccctcaccagaaatcacaccttgccagaaccttgatctcacagccttgagaagagtgaaagaaataattttctgttgtttaagccactcagtctacaatattttgttttggtaggctgagttgactaatacagttggaatacttttaaaaagagatagtttcccccatccattatttggttatcaagtgatactgtttatattgaagagactataaatgtttgaggctttctctgtatgtacttaccagttttcaagaaaatgaactggttccccatcatcctcttaaagtgagtaattcttttctctttacaatatcattatgaactcttgaacttaaacatatttgatgggtttcaatccatttcaaatattgttgtcactgaagcacatattgtgtcatagttgactaatgggagtgtccacaagttggctcctgagtcctttaacaagactctagtctttaaaagctttcttattacctagtatgacacaatgtttctggttcattttatacattccttgcctcaaatttagaatcaggcattctacatatgtcacttgtttctattaattcataatggtatctcaataccacagtcttggtggaaaagatacttattgttacttctttgataattgttttttttcccactagccttttattctatcatctatctatctatctatctatctatctatctatctatctatctatctacctacctgtctataagacagtgttctccaacatttttggcaccagggacaggttttgtggaagacaatttttccacatactcaggggatgaggtggatgattccaggatgaaactgttccacctcagatcatcatgcattggattctcataaggagagtgcaacttagattcctcccatgtgcagttcacaatagggttcacattgcactcctatgagaatctaatgtcaatgatgatctgacaggagacagagttcaggtggtaatatttgctcgcccaccactcacctcctgctgtgtggcctggttcctaatggtacgatttggttccatagactggtacctgtccatggcccgggggttggggactcctaagagataggtctgactctgtgcctaggctacactgcactggggcagtcatggctgactgcagccttgatctcctgggctcaagcaatcctcctgcctcagcctcctgagtagctgggattacaggtgcaagccaccacacctggtggtcattgtttatacatcttttcagtggagagagctaagaaatataaaaataaattcacatacaccctcccaagactgaaccaggaagaaatggattccctgaacaaaccaataacaagctccaaagttgaatcagtaataaatagcctaccaacaaaaaaaagcccaggaccaggtggattcacagccgaattctaccagatgtacaaagaagggatgacactgttcctactgaaactattccaaaaatttgaggaggagggactccttcccaactcattctatgaggccagcattatcctgataccaaaacctggcagaaacacaacaacaacaacaaaaaaaaaaaaaagaaaaaaaaaaaaagaaaacttcaggccaatgtccctgaacatcagtgcaaaaatcctcaacaatatagttgcacacaaaatctagcagcacaacaaaaagctaatccactgcaatcaagtaggcttcatccctgggatgcaaggttggttcaacatacacaaatcaagaaatgtgattcatcatgtaaacacaactaaagacaagtccacatgatgatctcaatagataatgcagaaaaggctttttataaaactcaacattccggccgggcatggtggctcacgcctgtagtctcagcactttgggaggcagaggtgggtggatcacaaggtcaggagatcaagaccatcctggctaacatggtgaaaccctgtctctactgaaaatacaaaacattagctgggcatggcagcatgcacctgtagtcccagctgctggggaggctgaggcaggagaatggcgtgaacctgggaggtagagcttgcagtgagcctagatcacaccactgcattccagcctgggcgacagagcgagactccatctcaaaataaacaaataaccaaaaactcaacattccttcatgttgaaaactttcaataaactaggtattgaaggaacatgcctcaaaataataagagctctctgtgacaaacccacagccaacctcatactgaatgggcaaaatctggaagcattctccttgaaaaccagcacaaggcaaggatgctctctctcgccacttctattcaacatagtactggaagtcctggccagagcagtcaggcaagagaaagaaataaagggcatccaaacaggaagagaggaagtcaaactattcctgtttgtagacgatatgattctatatctagaaaaccccagagtcttggcccagaagctccttcagctgataaacaactttggcaaagtttccagatacaaaatcaatgcagaaaatcactaccattcccatacaccaacaacagccacaccaagagccgaatcaggaaggcagtctcattcacaattgccacaaaaaggatgaaatacctgctaatacagctaaccagggaggagaaatatctctacaatgataattacaaaacacttctcaaagcagtcagagaagacacaaacaaatggaaaaacattccatgctcatggataggaaaaatcaatatcattaaaacggccacactgcccaatgcaatttacagattcagtgctattcctatcagactaccagtgacattcttcgcagaactagaaaaaactagttttaaattcatgtaggaccaaaaaaaaaaaaaaaaaaaaaaaagacaagaaagagcctgcatagccaaggtaatcctaagcaaaaagaacaaagctggaggcatcacatcacccaacttcaaactacactacagggctacagtaaccaaaacagcatggtactggtataaaaaacaggcacatagaccaatggaacataatagcccataaataaggcttcactctgcaaccatctgattttagacaaatatgacaaaagcaagcaatggggaaaagactttatattcaataaatggtgctgggataaccagctagccataagcagaagattgaaattggaccccttccttacatcacatacaaaaatcaactcaaaatgtattaaacaattaaatgtaaaactcaaaactgtaaaaaccctagaagacgatctaggcaataccaatctggacatgggcatgggcaaagatttcatgacaaagacaccaaaagcaattgcaacaaaagcaaaaattggcaatgcgatctaattaaacataagagattctgcacagcaaagagcaaaagaaactatcaacagactaaaaagacaacctacagaatgggagaaaatagcttgcagactatgcatctgacaatggtctaatatccagcatctatgttctcagttataagtgggagctaaatgatgagaacacatggacacatagagtggaacaacacacaatggggtctttcagagagtggagggtgggaagagggagaggatcaggaaaaataactaatgggtactaggcttaatatctgcgtaattaaataatttgtacaacaaacccccatggcacagttcacctatgtaagtaacctgaacttgtacccctgaactaaaaagttaaaacaaatttaaaaaacaaatttacaagagaaaaaccaacaacctcattaataagtggccaaaggacataaacagacacttttcaaagaagacaaaacatgcggccaacacacatgaaaaaatgctcaatgtcactgatcattagagaaatgcaaataaaaaccacagtgagataccatcttacaccagtcagaatggctgttttttaaaagtcaaaaataacagatgctgttgaagatgtggaggcaaaggagcacttatacactgttggtgggtctgtaaagtagttcaaccattgtggaaagcagtatggcaattcctcaaagagctaaaaacagaactaccattgcacccagcaatcccattactgggtatatacccagaggaatataaagcattctgccataaagaaacatgcacacaaatgttcattgtcacactagtcacaatagcaaagacatggaatcaacctaaatgcccatcagtgacagattacataaagaaaatgtggtacatttacaccatggaatactatgcaggcataaaaaagaatgatctcatgtattttgtgggaacagagatggagctggaggttattatccttagcaaactaatgccagaacagaataccaaatgctgcatgttcttacttgtaagtgggagctaaatgatgagaactcatgaacacagaaggaaataatagacactgtggcctatgtgagggtggaggctgggaggagggagaagagcagataaaataaatattggatactaggcttactacctgggtgatgaaataatctgtacaacaaacccccgtgacaagactttaccaatataacaagcctgcacatttaccccagcacctaaaataaaagttaaaataataataatttaaaaagtactttgtaatcttaaaaaattaacacacataaaaccttatgagtttatactgatacttgcaattcaaatgcagtgccatatatatagacttctggttaactttttttttcctgttccatcctttgtctttcccaccaagaattgtgctttttaaggccagaagggatgacagaattagaataccctgaaagtattcatttatcttatttcacaatagaaatacagcagcctcagaataacaatacgaatactaccaccatagtcggatgaatattaaataaaagcaggaaaggaattagaacagagagaaaaggggaggaaggaataatagataccattctattgaaggtttggtggctattggtagttttcctcattctcatattttgcctttgtgataccttgtctcccaaagttttatgaaacattcatgtgtttttggttttgctttagttcctctatttttactgtctatgtacttttcatacaactttttgtttattttttaaattttattttttaattgacaataattgcacatattcatggggtgcatagtgatgtttcaaaacatattatgtgtagtgatcagatttggtaactagcatatctatcatctcatacctttattatttcttcatgtggtgaatatacaatatcttccttctagctatttgaaactatatattattgttcaaaactacaaagaagtttaaagaatagtacaatgaacccttgtatacttttcacccagattcaccaatttttaatattgtgtcactacatttataaatatataattctttctttctacttaatattttaatatgagaaattttaagcataaagttgaaagagttttacagtggccactcctgtagctgctgcctggattttactgttaaattttgctatagttttatcagtgtcagtttatccattccattatctatatattaatacatattgatgcattcagaaataaattgcagaaagacattcatgatcatgcatcagaaaaattaatattgttaatatgactgtacttccccaaattgatctaagcattcagtgcagtcttccttaaagtctcagctggtttctttgcagaaatatgagaagctgacctaaaattcatatcgtatggaaatgtaagagatccggaatagtcaaaacagtcttgaaaaagaacaaagttggaagactcttccaagatttcaaaattcactagtaagttacagtaatcaagactgtttggtgctgacataaggatagacataaatcaatggagtagagttgaaagctcagaaaaaaactctcacctttatagtcaattgtttttcaacaaggatgccaagacagttggaggaaagaaaatattcttcaacaaatggtgctgggaaaactgaatatcaggtgcaaaagaataaagttggacctatattacctaccttatgccaaatttaattcaaaaaggattttttatatgcaatgtacaaaataggcaaatctatagagacagaaactagattggtggttgcctaggactgggtgggggatgtggttggaagaaaatttgaagtgactcattggtatggggtttctttttgggatgataaaaatgttctaaaattgattgtggtaatggttgcataactctgtgaatatactgaaaaccattgacctgtacggaagtcatagcccaataagctgttagagaaaaacaattgcagaaaccaatacactttctcctaaatggttcaacatttatattaataactagggttcaatattggtttatgcattttagttttgatataaaaattccataagatgaaatgcagaaatcttaagtgaacattcactgagttttgacaatacatacatctgtgtaatccattccccatcatgttatagaacattaacatcaccgttggaagttccctcctgtcatccttctagtgagttttctcctatgtaccacctaaggcatactttgatctgattgttttccagcacggaattatccacctgatttagtattttacataaaatgcataatttaataggtacttttttatgtaagactttcactcagtatgctattaatgagattaatccatattgttgcatttctttagtgactgagtcatattccattgtatgaatataccaatgaagatttatttttttttaattttttttattttttgaagttttaaagctgggcatccgggggagacatcacatgtcagtaggttccgtgatgccccacaagccgcaaaaccagcaagtttttattagggactttcaaaaggggagggagtgtacgaataggtgtgggtcacagagatcacgtacttcacaaggtaatagaatatcacaaggcaaatggaggcagagcaagatcacaggaccacaggacccgggcgaaattaaaattgctaatgaagtttcgggcaccattgtcattgataacatcttatcaggagacagggtttgagagcaaccggtctgaccaaaatttattaggcgagaatttcctcttcctaataagcctgggagcgctatgggagactggggtttatttcatccctacagtttcgaccatagaagacggccacacccaagggggccattttagagacccaccctcaggggtgcattcaccaatgaagatttattatcataatgatacttaggctcagtttagtttctgtatattgtgaataaaggtgcagtgaatatttttaagcaggctttgtgtgaacctatgttttaatttcttttggattaatagctgggagtggaattgttgagtcatagggaaggtgtatgcttagtttcatttaaaattgcctcagttcaggagaatggcgtgaacccaggaggcggagcttgcagtgagccgagatcgtgccaccgcactccagcctgggcgacagagcaagactctgtctcaaaaaaaaaaattgcctcagttttctcaaaatggttatatcattttatattcccatcaatcaagtatgacagttccagttgttctataattactccaatatttgatgtcagtcttttaaattttaaccattctagtggttttattgtagtatctcaatgtgcttttaatttgcatttccctgatgactagtgatgtcgagcccttttcatgtgcttattggacatttgtgtattttcttttgtgaggagtctgttaaaatcttgtgcctatatgtcaattgggttgtttgtatttttattgttgagctgtagtaattccttttatatcttggataccagttttttgtcagatgtatgtattgtgaatatcttctttcagtctctggcttgcttattcatattaataattgtatattttgatgagttatttatccactttttgtggtttttcctgtctttgccctgtccaaaaaatcctgcttaatctcaagtcatgttttgttttttatatgtttgtttataaaggttttttcctctgtgttcctgtaaaagttttgtaggtttttatgttttatgtttctaatccatgaccttttatgttttaatcgatgatctttctcaaataatttttgcacttagtaatgaagtagggattcaggctcatttttttccaatagggatatccagtattccagtaccatttttggaatatgttttttccctattggattgctttggcacctttgttgaaaatcaagtacactatctctattctgtttcattgatttatttgctgattcttaagatgataccacaccgtcttaattactgtacctttataataagtctggaagtcaagtttgtggccaacccacatcccaagattatgcagaagatctaataaagaaaagcaagcttttaactaaattataatcaatgccttcatctttataatatgaataatgattcacttggagcattttcagcttgtttatctgaaccattaaagtcattttaaagtcagtttaaagtcattaccatttcctgggaaaattgctctaataatttgtataatttgaagcataatccttaggaatatttagacctagcattaggtaatgtttcctggaactcttggtcaaacttgggctttcaggaccactgcactagttttgcactgctcagctccagggaaccatttacactggcatagttgctagaaaggtaaataaaagcaagaaagaagttagaacagagtggaaagaagttagaacagagtggaaagatgaggaaagagataaaagaaatatttgtggtataacgtggtaggtcgtcatgtgtctggtatcttttagatagactagtaaggttagtttcaatcacttattttaattgtatcaaaaaagtaaagcagataaaagtagagctttctggctaaagtatatgtgtataagatcaccgcagatcatccccttcacacctcctcttttatcacccacagtccctaaagctgaaatccagcatatagtaaggttgttacattgcatattgcagtttggacatttataaattatggaggcaaaaaagtggtgtgcttttttgccaaagtggaaactatgtgtttataattctttgagcttttttgacactaaagcagttgtctcatgggtatagcatctccaatcaatttcgaccattgggaatcctgtgtataagatagatttatgtaagaacattatatatattgaggttgctaacatgtgtctagttaaaaatgtaatgaataaactacaattttatatatacacttacatagttttttatttctccatttgttccagtttctttccatgttctgttaactaatagatgctcaaaaagttaattatcagcatgattgcctcaatcagaaactatgactttttcctaacttaggaagagagagaatagttgcttggataatagttttctactgttgtggttagtcctgaggcctccatcttggcaggaataatttatgctaataagaaataggttgatgataaatatcaagtataacctcatgtcaacaagaggcgaagcagcaaattgccaggttgttgctatttttattaagatcaaagctcattggttgacgatatgcatataagacatatcctggactctttctgcctgtaaagaattctgcacctccatcttccagacctgtttattaaatctctttctcacccatgcttccactgatttctgtaagatggagctaattaaaggacagttttttttttgtcatgacaagagcataaagtgacagtagattttgagtagtatataaatggaagctgctttggaaataattgctatatttgagtgacgagtattgagaaaacactactagctttaatatttgaggaagtcatatgttttctaaatattaatcactagcctgttgcatagaactggagcttttgaatttgggaaggtctgtggtggcagtggtacattttttcccaccattggtatctgattttatgtaatcagtgtttgataataaaaaacattattaagactgcatttttttttctgttggttacaaatgaaacagccagaactgtagcattccttgtttttgtgatcctactaaactatggttttcctgatttctgctcatgttggaaaataccatgggaactttcatgcagaacacttgccttactgaaaatggtagcagagcttcttctttgctgcctgtgaagtaaagatcatattagctctttctattgtgagttccagatgctttgatgatcagccagtaattgtgttagaaatgcacaggaaatggttgatccacttggtgtaaaggcaaaaaccaatttcttcttactgcctgtcagcaggcaacagggaggcctatggcatgttagtgcatttttacactggcatagagccctggagttagacttactgagtcttaaatgcacttcgaacacaggttttgactgcttcataggagacattccagacatatttatgctcagcacaactctgaagtttttattcttattatcatggtactgtggtctttttgtttgcttcttttatctgtgatgttagtacttttccaaggccaagttaaaacaaataactacagttaagttcaacttgtgttaatctgtttacatttatggaacagctttgctgcaatctggagaaagataatgaaacacaggatacgtctgtacatgcctggtagaatggaaagctgcagtactgtcaataggccatcaataaagatattcttaccataaaattaaggttcatcttatttcccagttttctttttacagtaaggctatatctgttgattaactcatttatctggaagtaaatcattctaaatgatactggacattttcataacatccagaaataaattctagcttaaaatctgatgattttattatgttactcatgttttttacttcaccattctcgaccactaatttttagttggaagtcttggataatttcttccagtgaaattagttagtaatggaaggaatgtggcatttgaaagcaaaagatggagttcaagtgttagcctacggtgctattctaatctaaatattcatttaagccttctaaacctcagtttctatatctgaaaacataggtaaatattcctgcatacatcagagcattattactgagaggaccagataagtatatgtcatattatttataaattgcaaagaaatatacaaatgttcatcatcatttttgttgtttgcaatgcttttaactcaagcttcttaacacatcaatcccatgtatataattccttatgtgccaggttagatataataatataacttgagaatgtatatttcattttatttttgaaaatatacgtatcttaagattttcttcccaaggtttcatattataaatgaataacaatcatgactgcagaagaaatttaattataagcactgtccatctctccccattcccaaagtaaaataactgctttcagtttgaataggtaaattaaatgtttctctgctccttctattatagcttttaagaaacagtattaaatgattccttgagttgatttcactttaagattattttaatccattactcatttgagtttgcatcattgaattttctttatcaaggacgtaagcaggttaaatgtgtattggggaaatgtcttaaatgtcagtactatggtctggctgccttgtgagtacctcatcattggaggtgttaataaggtgtgactggatggctagaaatattttaggtggatatcatacatcatgtagagctgaagactggaaaactgctaattctatgctgtgatccttacttatgtttattttccaatttagatgattaacagatacaaatagttatttccttcaaacattgcttgtttcacttcaaaactttgggaatgcatgctacggaaaaatctacttcagtagcatgtgaaaaaatacatcttatttgccttaccatcagttttctaagcattttttttctcttttgaatactcataatattttatgtttgtcttataccatttatctcattctatctaataaatactaacttgtttatttctcttattgtccttattgggttttaaagttcttctggggagatatttaacaatctccgtataccccacatgagctatacagagccaacactatataaaataaagttatcaaatttcatttattgtcattagtgcctaaaacttggggaaaagttgctattgaataaaatagcgtacacttggtttctttcttatctgccagtcacagaatctactcttagcaaatgtcattctgatttagagtaattttctaatatagaaatctcatttacccaaataccattaaaattatctaataaggtaacgatttttaaaaggtcccatttcactatttccaaatggtatccaaaagtacttgtaaataaaaaatttaccctaagtgagctgtaggcatagcttccccatccaaaacataaagttatagaggctaatctcacgaacttttctgtggatttttaaggttaaactactggtaaagaagcaattggtaatttgttcagactggatgccagaatagctccgttgtctgttagctgatgtctttgaatctttgggctcactttttatcaatgtgagtttatgagaagccttaaactctggcatacttcaaagtctggtaactttttttaggcctctcacctcctttctgcaacctttcttaactctcacattagggggaaaaaacatatgggatctcaaaaaaactaagtaagcatattttattgtttatcttaaaaaatgcatttttttaaatcaaggaaaatcattaactacatcagtatcgatgaattacatgttgtagtcatcatattttaatgagtcttctctaatatttttagttctgagtttgtagaaagtggcagatgctgttctggttaaaaggctttccaactgattaacgtgttcatccctaatttaattttttaagaaagacacttatgacagcgagaagaaaacgtttcatcttcataggaaatctggcaaaatatcttggcttttgctcaaaatttgaaagcaaatgggaatcagtttcaaatattggaaaagtcaagaaaacgattctagctctggctctgtcattggctctctatttcttcatgtataaaatgatggaaatagattaatttctaatacctctttcaactccactaacattcttttattgatagcatttgttagggagaaataacaagatttgtttatggattgtgataggatatcaataagggggtataacaaagatacctaaaattttcatccttggactagtaaagaatggtcagtccacaaaaacaaaataggggttttgtgttaagggtagccaggtcgaagataacttctgttttgaaatgttaaaggaatatcttctacaagtttatgagactcatgggagtggccattgcatggtaatatggcatagtattatattgtttacatacaatttaaaaagtacaggtagtactgaaaaacatctgttcctgtcctcatcccttttgactcctagatcagtttttccagggcaaaagttgcaaataatttttgctttatcaacattttttattaacttcatgctatgatagatgatgtactctttgtgctacttcccttatccctcttccaccatctcctcccaatgtgttactgtttttaattaaatcaataagcaatgtttacattattttgaatatgtacatattataaatatgttgcttattgtattgtcaggtaatactctatggttctatttctttttatcttttccctatagtttctaattacatttcttttattcctgtaatacatttcttatactatttgggtttttcttaatgctccatgatatccactttcctcactttttccctgagagactacactgggaaccaaattgtcagtggtctttttttattttctgattttgtttatggtacataaaaatagaattcactttaacatattggtttcatatccagcaactttgctaaaattcattaattctaatttctttgtagattcttttgaattttctctgtatgcaatcatatcacctgtgaataacatttttgtttcttttttttaaacaaactttttcttttctttcaataatggctaggccctaggttaaatccaactttatcacattttatttaatatttttgcatctgtattcattggtaagattggcctgtaatttttctttcagactcagttctgtttaggtttgatataatggttatgctaggtttatctctcctcttctgttttctggaagagtttggttaggtttaatgctttttgttctagcttaattacattatggttagagatcatgttctgtacaaattccatccttcgagatttgtttagacaagccttaaggtccagtatatggttagtttttataaatatcccggatgtgcctgatataaatgtgtgtctttcatttcatgaggcattgtattatatatgtccattagaacacgtttcttagtcatgttcaaatctttctacatttttacagtttattttctttacatgttcaatcagccattagaggtctgtttaaaatctccgactctgattgtggatttgtttatttcaatttgtttatttcaatttattttaatatcttccttgggaaccaaaccttttatcattctgaagtggccttgtttcagcttttgcaacacttgtgcctcaaaatctactttgactgaaattaatacagctatactagcttcttttggttattatttgtgtatgacttttaaaatttttaattccaacctttctgtgtaactgtatgtttttgatatctctgatgaatggctcaaatgttgaaatttgcccctgtttttgcagtctgaaggtatttgtctctagaatgtttctcaatgtacttacctaactttttagtaaccagattttcaaaaaatttaaagacgatataatgaacaccattgtatattcatctagattcaacacttgttagtattttgccatatttgtttgtctcttgctttccagggtatctatgtgtgtgcatgtgtttaatgattatgtaagtatatgtgtgtttatacacattttgctaagccatttaaaagtaagttgcagaaatcagacactttatatgcataaatacctgagcatgcatcatgcctcacctaaggaaacataaacatgacataattatcaaacataagaaaatcaacagcaatcttaaagtgttatttaatattcaagtcataaacaaatttccctaatggtcctaaaaagtctttcatagctgttcatgtactgcatttatttattctcttacaaatttgaatatctagaatgcgttggaggaaaattttccgtggatctttcatgtctctgtacatcctgagaagagaggcattgtcattgttctgaactctcttttcaaggatctgttataatgaataactcggaaaattgagatagtatctcactttggaggaaaggccaggtttgtctaccttctagtacaataaagatattaaaaatatctctgggcaaagataaagcaagcttactgcccactataaaatatatggattccctaaacacccagtttttcttctataacctattgcactgcatgtgaaggcatcaccttgtctgctttacatcaccttgtgggaattggggctcgcggaaacccagggtattactgtaaataataaattagttgttgtctctgattaagaagtcttgtagcgtttgctggtgtctataaaactatggcaaggctaacttgttaactttcaagcatagaaaagtcttagtcccttcacggttcttgacagaatggtcttcccactttttacttcattgcactgattttttttaacagcttcattgagatataatttacataccatacattttacccatttaaagttctcagtaattttagaatatttacagtagggcaagcatcaccaaaatcaattttagattttttatcaacccaaaaagaaacctcatgtctcttagctgtcacgttccatggcagcccagccccccagccctaggaaaccatcaatctacttgtcactataggtttgtctattctgaacatttcatagaagtaaaatcatgcaacgtgtggtattttttgtctggcttctttcacttagcataatgttttcaaggttcatccatgctgtagcataaatcggtacttcattcctctttattgccaaataatattatattgtatgcatatactacattttgtttttcagttcattttttcatggacatttaggttgttttatacttttttgactcttataaataatgatgctatgaacattcatgtacagatttttgcatagacatgtttctgttttatacctaagagtggaattgctggatcacgtttactttgtttaggaactgcccgacttttataaagtggttactccattttgcattcccactagcaatgtaggagagtttcagtttctccacatcctcaataatacctgttattgtctgtcttgattatagctatctagtgtgcgtgaagtggtatttcattgtggttttgattttcttttcatttccctgattattaacgatgttgagcatatatttatgtacaataagcccataaaaagatatatatatattttgaaaaatgtctattcaaatcttttgcccattataaattgtattatttgctttctagtacattataagaattctttatatattcttgatatgattctcctgtaaggtatatgattggcaaatacattttcccattctgtaggttgtcttttcactttcttggtagtgtcctttgaagctcaaacttttacaattttgataaaattgtttttaactttttttgttacttgtactgttgctataatatctaagaaggctttgactaaacaaaggtaaaaaaaaaattactttttttttttttttgagacagagtcttgctctgtcacccatgctggagttcactggctcaatcttggctcactgcaacctccgcctcccgggttcaagtgattctcctgcctcagcctcctgagtagctggaattacaggtgcgcgtgccaccatgccctaatttttgtatttttagtagagatggggtttcaccatgttggccaggctggtcttgaactcctgacctcaggtgacctgccttcctcagcctcccaaagtgctgggattacaggcatgagccaccctccccggcccaagaatatttagctctgtgttttcttctaagagttttatagttttagttcttgtgtttaatctttgatctgttttaagttaatttctatgtatagtgtgtagaagaggtccaagtttattcatttgcatataggtatccagttgttccagcagtgtttgttgtaatactattccttccctcagtgaatgtccttggcacctttgtcaaaaatctattcaccatagatgtatgggtttatttttgtaatctcaattctgtcccattgatctacacgtctgtccttttgccagtaccacactggtttgattattgtaggtttgtagcaaattttgaaattggaaagtgtaaatccttcagctttgttctttaaatattattttggcctttggggttccttgcaattccctatgaatttcatgtcagttttatgatcagcttttccatttctgcaaagagggcggttggaatttttataaggattgccttgaaggtgcagaaaaatgtagggagcattatcatcttagcaatattaagtcttctgatccatgaacatgggataattttttatttagttaggttttctctaaattctgtcaacaatgatttgtagtttttcagagtaaaaatttttcatttcttaagtttattcctaagaattttatcattttcatgcagttgtaaatggattttttcacttaactttatgctagtctataggaatacaattgatttttatatagtgatcttgtaccatgtgaccttgctaaattcatttatttgctctaataggattttctgtttacaagactgtgtcttatgcaaagagatagggctttacttccttctttttgatatggatggtttgtgatgtgattatttcacattgcatgcctgtatcaaaacatctcatataccccataaatacataaacctactatgtacccacaaaaaattaaaaatgaaaaaatttgcatagggattgttaatttccttgtgtaattgccctacatagaacctgtaggattatgtggaaaagaaatgacagagtggacattcttgtcttgttcctggtcttatagggaaatgatttagtcttttaccattaagtatagcgttagctgtgggttttttgtagatgcccttatcaagttgaggaatttccctgttattctgatcttaatagtaatgtcctctcttttatttctgattttaatttgagtcttctcttttcttggtggtttgacaatttttttgagcttttctgagaaccagcttttgatcttgttgattttccctattcattttttattgttcatttcattaatttcagctcaaatctttattatttccttctttctacttgttttggggttacttcgctctctttttctgatgttttacattgaaatgttagtttatgatttggcatcttttttaatataggcagttactgctgcaaatttatctctaatcactgctttaaatgagtcccatatgttttggtattgtgtggttttattttcactcacctcaaaatatttctaataaaccttgtcatttgttctttgacctataggttaattaaaagtgaaatatttcttttctttatacttgttgatatcctgtttatttctgttattgatttctaattttattccattgtggttggaaaacatgctttgtgtaattgcaatacttttaagtttattgatgtttgttttatggcctagcatatgatctatcctggagaatgttctatgcattcttgagaaaaaggtatattctactgtaattgggcagagtgttgaatagatgtgtcttaaatgcagttggtttatagtgttgttcaagtcctctatttccttgttgatcttctgtctctcactgttccactgattattaaaagtggagtattgaagtccccaactatttttgaattgtctatttcttactttgattcagccagtttttgtttcatgtatcttggtgttctgttgttagatgtatctgtgtttataattgacatggcatcctgtagaattgacccttttatcattataaaattcctctctctatctctagactttttttgttttagaatatattttatctgttattagcacatctactctagcttccttaaggttgctgttagcatgactgtatttttcaatccttgtagtttcaacctttttgtatgttttaatctaatgtgttctgtagctgccattggatcttgatttttttatgaagtctgccaatctctgatttttgtttggcttgtttaatccatgcacattcaatgttattattgatatagttggatttttgtccgtaatttcactttttgttttctatgtatctcatggttttttgttgttgttcttatgttcctcctttactgccttctttttttttattaagtgaatattttctagtttaatattgcagtttctttaatgattttatttaatgtatttttatttgtttttcttaatggttgcttaccacgtaaattataacctattagagtttacttaagatttatagagttctctattcttactgtcttctcttactctaggcaaaattgctgatactgttccagagctgggagcgggaacactgttccccttcttttggagtaacacacctgctttattagcagggcactaagcaggaagaatagcctttgatcttcctggcttgcctctttcagcatcatcttctgttctatgagcaagttagagtgagggcaaccagatcaaatactcctgggctgctgtgcctggctggagtagagcttttgccttatgagttagggctgtgtggaggacaagagtctaagaactctcagctactctcacttggaacagagcttctataacaggacacacacggtaggggaagatcagaaatgctgatgacttgttccttcctgtgagatactgtagtgcttaactgggagctgggaggagaaggagccctggtttatggatgcacctaccttgggtgaagcctttgtgaagctgagcaagggaggtggagaaggaaggagcaggtcataatgccatagatacctgttgtacatatcaagatttaacacatattgttgaacgtttgttcattggctgtatgttcgtaggacaatatccagatacttgagtttttaaaacataaatttccccacttatcattgttttgctagggagatggtccacagaggtcctcacactgccattcacaaagtcatctctcccatggcatggcattgactttttccctttccttttcctctttctttcttcctttctttctttctctttctttcttctttccttctttctttctttctctcgctctcccttccttccttccctccctccttcctttcctccctccctccctccctccctcctttctttctttctttctttctttctttctttctttctttctttctttctttctttctttctttcttctttctttctctttctttctttctttctttctttctttctttctttctttctttctttctttcttcctcctcctcctccttcttcttcttttcttttcttttcctttcctttcttctttttttttgacagggtcttgctctgttgcacatactggagtgcagtggaacaatcatggctcactgcagccttaatctcataggctcaagtgatcctccctcctcagtctcctgagtagctaagactacaggtgcatgtcaccatggctggttgatgtttaattttttttgtagagatagggatctcatcttgtgtcccaggctggatgtgaactcccaggctcaagtggtcctcccaccttggcctcccaaagtgctgggattacaggaatgagtcaccacacccagctggcattgactttttgaagagtccgtgctagttgttttttataatgtaccttattccaaatttgtcccatgttgtgtcgatttacacttaattacacttaatgtaattactgatatatttgttttatttgtcttgcattttaaggtatcactttctctgtctgcctctctttcgtcttcttttggatgtattaagtattgtgcccctcaattactttgggattaatactctatttatcttttttaaaggtttaccctagaagtgacaatttctaggttgtatatgtatcaaagtccaaagtaatcaatatccttaccagttttctatacaattacaaagaccttaagaatgctttaacttctttcaccctatctcacttacatcatattaccaatgtgtatttctttcaattctatattttaaatgccacagtatgaaagagatgcatgttgcctacccaccagcccaagctgaggctaccaaggcagccccactctttccagtggcagagtctcagcatggctgctaccacccctcacctgaacactccacctggatactgaatattaccctacccccacctaacagagctggtgcttgcactcaccattggggtcctgagcacaagccgcagagccgagcttctgctctgagagagaacacatagcctgaggtcctggggattatctaacccaatccaccaccgtgggccccagtcctcctgggggcctgaggttgggcctaaactcccaaccactaccacttcagctggtacctgcctgcaagcaccacatatgggcctggacatgggcctacccagcccattgcagctactatcaacgtcagtgcacactgctcaagacccagacaattgtccgtccactgctactgccatcacccacaccatgccagctgcccagggactgaagaacctgctcacccacctggtccactgctggcattatcagcatccaagcaagacacctggaggcctaagaataggcccactgacaacagccaacaccagtgccagtgtaaaatgctctagggcacaaagatatgcatgctcagcccactggtgccaccaccgcagccttaagactagcacacctgttgttccagtccccagcacaacttcaccacagccttcactaataaccataccctaacacaccaaggaaaccataaacaccactaatgctgtttacagccaaagaaatcacacagagactatagcactatgaacagaatcaaagtcaaagtaccatacacagccaatatcttagatacatcttcagaaaaatatccttccctatgaaagtaaattcaaaaataggaagaaatgattgttacaccagatgcacagttaccaacacaaggacacaagaaatatgaaaaagcaaggaaatatgacacttgcaaaggaacacaataattctacaacaatagatcttaatcaaaaagacacttttgaaattccagagaaagaattcaaaatattgattttaaagaagctgggtgagatataagataattccgaaaaacaatacaaagaaatcaaaacacagttaaggataagaatgaacaatattactaaagagataagtatttttaaaaagaaccaaatagattaggtggaataaagaacctcaaaacttgaagtcagttctttttaaataaaccagtcaggtaggaataaagaaataagaattttaaaaagaatgagcgaagctttgtgtcatttgggacaacataaattgatcaaatcttaaaaattattgttagccccaaggatgaagagacaaagaaaggattagaaaacctatttaaagaataggtgaaaacttcccaagtctagtgagagatttacataatcagatacaggaggctcagtgatccctaggtagatataatgcaaagaaatcttctccatgacacattatagtcagaaagtctaaagtcaaatataaagagcaaatcctgaaaacagtaagagaaaagtgtctagtcacttctaaatgaaaccctatcaaattaacagtggattgctcagcagaaccttacaggccagaagagaaagggaataaatatattcgaagtgctgaaagaaaaaaattgccagccaagaatactacatccctcaaaattatccttcatcaatgaagaagaaataaaaaatctttcacagataagcaaatgctgagggaattctttatgactagactgaccctacaagaaatgctcaagtgagtcctaaacctggaagcaaaaggacaatatttaagatcatgaaagaacatgaaagtataaaactcacagataaaccagtcaatcaaagaaggaaaagaaaggactgaagcggtaacactatagcaatctaccaaacctcaaaaacaattaaaaagagaaaaagaaataaacaaagaatatataaaacaaccagaaaaccattaacaaaattacagaaacagagcttcacatattaataataaccttgaatgtaaatggattatattttccacttaaaatatattaaatggctgaatgaatttttaaaaaaacatgatgcaactatatgccatgtataagaaactcaccctaacagtaaagacacatatagactgaaagtaaagggatggcaaaagatattccatacaaatgggaaatagtagtaagcaggaatagctatacctatatcagataaaagagagtttaagtcaagaacagttaaaaaaaaaaggcagagaaggtcattatgtaatgataaatggaacaatccagcaagaagatacgacaactccaaatatatatgcaccccatactgtagcttccagattcataaagcaaatattccaaagagagaaatagatgacaatacaatcaaagtgggggtttcaacactccactctcagcatttagacacatcatctagacagaaaatcaacaaagaaacattgggtataaatagggcttcagacccaataaacctaacagacatttacaaaacatcctacccaacaactgcaggttatacatcctgcagttatacatggaccattctccaggatagatcatgtgttaggtcacaatataagtctcaacaaattttaaaaattgaaataatatcagttttcttttcagaccactttggaataaaactagaaatcaatacaaagaggaagattggaaactctgaaaatacatggaaattaaataacatgctcctgagtggccactgggtcaatgaagaaattatgatggaaatttaaaaatttatttgacaaatgggatctaattaaactaaagagcttctgcacagcaaaagaaactaccatcagagtgaacaggcaacctacaaaatgggagaaaattttcgcaacctactcatctgacaaagggctaatatacagaatctacaatgaactcaaacaaatttacaagaaaaaaacaaacaaccccatcaaaaagtgggcgaaggacatgaacagacacttctcaaaagaagacatttatgcagccaaaaaacacatgaaaaaatgctcaccatcactggccatcagagaaatgcaaatcaaaaccacaatgagataccatctcacaccagttagaatggcaatcattaaaaagtcaggaaacaacaggtgctggagaggatgtggagaaataggaacacttttacactgttggtgggactgtaaactagttcaaccattgtggaagtcagtgtggcgattcctcagggatctagaactagaaataccattcgacccagccatcatcccattactaggtatatacccaaaggactataaatcatgctgctataaagacacatgcacacgtatgtttattgtggcactattcacaatagcaaagacttggaaccaacccaaatgtccaacaatgatagactggattaagaaaatgtggcacatatacaccatggaatactatgcagccataaaaaatgatgagctcatgtcctttgtggggacatggatgaaattggaaatcatcattctcagtaaactatctcaaggacaaaaaaccaagcaccacatgttctcactcataggtgggaattgaacaatgagaacacatggacacaggaaggggaacatcacactctggggactgttgtggggtggggggaggggggagggatagcattaggagatatacctaatgctaaatgacgagttaatgggtgcagcacaccagcatggcacatgtacacatatgtaactaacctgcacattgtgcacatgtaccctaaaacttaaagtataataataatgaaataaataaataaaaaataaaataaataaataaataaaaatttattgaaatgaaaatgtaaacacaacatacatattcagcaaaaatagtgctatgagagaagtttatagcaataaatgcctacattaaaaacgtagaaaaataaaaatttaacaatctagcaatgcacctcaaggaactagaaaagcaagaacaaaccaaatcgaaagttagcagaagaaaaaaaatagcaaagatcagagcagaactaaacagagactacaaaagcaaacataagggcccaacaaaatgtaaaactgcttctttgaaaagatacacaaaatttgtaaactgctagctagtctaaccaagaaaagacccaaataaaatcagaaatgaaaaaaagacactacaattgatatcacaaaaatacacaagatcatcagagattattatggacaactatacactgacacactggaaatcctagaagaaatggataaattcctggaaacatactacttaccaagattgaatcaggaagaaatagaaaacctgaacagaccaataatgagtagtgagattgaatcagtaataaaaattctccctacgaagaaaagcccaggaccagatggatacacagccaaattctaacaatcgtacaagacagaaataataccaatcctcctgaaactattccagaaaatccaagggtaggaaattctccctaattcattcctcgaggacagcatcaccctgatatgaaaatcagacaaggattcaaccaaaaaagaaaactgctggcaaatatccctggtgaagattgattgaaaaacaatttaaaaaatactagcaaatccaattcaacagtacgtcaaaaatataatacacatgggtccattgggattgaaggcaaggaaggcacaacctttgcaaatcaataaatgtgatacattacatcaacagattgaaggacaaaacaatatgaccatctcaatagatgcagaaaaggcatttgataaaatttaacatcccttcgtgattgaaactctcaacaaactaggcatagaaggaatataccgtagcataataaaggccatatacttcaaatccactgcaaacatcatattaaatgaagaaaagctgaaatcctttcctctaaaaactggaacaagacaaggatgttgactttcaccactcctattcaacatagtactggaggtcctattaagagcaatcaagcaagtgaaaaataaaaaaggcatccaaatgggaaaagaagcagtcaaattgcccctctttaccgatatatctatctagagaagcttaaagaatgaattcagtgaagttgcaggatacaaaatcaatgtacaagaatcagtagcctttctacacaccgataatgatctaaccaggaaagaaagaaagaaagcaattccatttacatttggtaaaataagtaaaatacataggaataaatttaaccaaggaggattgattctacaaggaaacctacaaaacactgttgaaagaaatgcaggtgatagaaacaaatggaaaaatattttatactcatggatcagaagaattaatattgttaaagtcatcgtattgcccaaaggaatctatacattcaacataatcgctatcaaaatgccaatgcaattttttcacagaattagaaaacaaatcctaaaatgtatatgaaaccaaaaaagagcctgaatagccaatgcaaccctgacctaaaaacaaagctggaggcatcacattacctgacttcaaaatatattacaaggctgtagtaacccaaactgcattatattgttatgaaaatatagaccaatggaacagaatagagaacccagaaataaagccacatcttcatagccaattgatcttcaacaaagctgacaagagcttacactggggaaaggtaatcctcttcattaaatggtgctggaaaaattggatagccacatgtagaagaatgaaactggacccgtatttctcaccatatacaaaaattaactcaggatggattaaagacttaaatcttcttttgcacaggaaaagaaactatcaacagagtaaacagacaacctacagaatgggagaaaatattcgtgaactgtgcatccaacaaaggtctaatatccagaatctacaaggaacttaagcaattcaacaagctaaaattttatgtaaatataagacctgaaaatataaaactactagaagaaattccaggggaaaactctcctggacattggtctaggcaaagaatttgactaagacctcaaaagcacaggcaacaaaaacaaaaatagccaaatggggctatattaaataaaaagcttctgaacagcaaacgaagcaatcaacagagggaataaacaacttgttgaatgggagacaatttttgcaaagtatttatctgacaggggactaatattgagaatacaaaaggaactcaaacaacaggaaaaaacaaacaaaacaaaataaaactccaattaatcccgtttaaagtaagcaaaagacctgaatagacatttctcataaaaaagacatacaaatggtatatgtaaaatgctcaacatcgctaatcatcagagaaatgcagatgaaaaccacaatgagatatcatcttatcccagtcaaaatggctattaataaaaagacaaaaaacaacagatgttggcaaggataaaaaaaataagggaactcttatatgctgttgtgaacataatctagtacagccaccagaaaactgtatggatatttaaaagaaagagagaaagagaaagagagagagagaaagagaaagaaagaaagaaagaaactaaacatagcatcaccatacaacccagcaattccactactaggtatctatccaaaggtaaagaaatcaatatatcaaagaaatacctacacttgcctgtttattgcagcagtattcataatcacaaagatatgcaattaacctaagtgtgtatcaacaggtgaatggataaagaaaatgtggtacatatacagaatggaatactacttagccataaaaactagtgaaatcatgtcatttgcagcaacatggatggaactcgatgtcattctcttaagtgaaataagccagccacagattgacaaatattgcatgttctcacttgtatgtgggagctaaaaaattgaccatatggaggtagacagtggaaagacagagaacagagactgggaagggtaagtgtcaaggagggggaggatgaagagaactgggttcttagcatattaaagatgtcattccgtggtcttctggctttgattattgcttctgagaactaatctgtaaattaattttcactctcttgaaggcggtctgtcttgtcttttttgatgcttttaaggcctttcctttacttttatgttatgcagttatgttctgctgcacctagtttcaggttttatttttatgccattgaatctgtttggtttcttgaatcacaaatatctgtagatttttcttgagaaatcttagccgttgtctctttagtattgtctttattccctctctcacctcttctagaatcccaatttcctttatgttattcttcctcactctttcttccatgtctcttaatgattatttcacagtttccatgttttatctctatgccacattatatataatttctttttagctttactaagtcttttaactttatactgtctctcttcagctctatctagtctgttgtgaagcccatccattgagttttaaatttcaattactatagcttttacttctagaatttatattttatttcgattgagctatgtcattttcatacaattgctggctccctttattatttttaagttagaaaaattcttctataattgtaaagatagttactatatattttttatctgataattccaatgtgtgaaatatttagtgagtactttctgttgtcatatgtttcttttggcttttgcttatggttttttttcttgtatgcttaatggtttttaattaggaaatctcatcttcctttaaaaaaatgatacattagaattatttgaagtttactatgaaggcatgttttttctacgtagagtcagtatgtatttttgcccagcctctagaaggtcaatgcagtcagagtccactcaggtaatgctaatttggattgcaaatctggccagtttgtggtgagttttttaagggttttttttcctgtacttctctgctaagcaccaagagatcttttcttccacctccctgggtgtgggattgtgaggtacatttatgcgtggtacacccttatagtaaaagaaattataaaacaaaacccaaaaattatccaagtttggcatatgtcctccgggaaaaagtagtttcattgatcagttcattttttggttttccctagattttgatttgataaatcctactgtgcttccctttgatgcttttaggaagaagtttttacttttttccaagcattttttttttaagtaagcatttcagtctggatacctaactggccacattattggaatatttcttatttctctctgccattattttgtagtatgtgtctccttggaacacctgaatcaaaattacttagagatgtttattaaaatttcagattctgctattcaacttcagcttactggaagaatctttacgatgggttgctggtatgtaaatttttgtgaggttctttaggtgaccctaattcatacagaatttgtttttatttgtacttttaagtctaatatctgctgttttaattgtagcagcatgagatctaaatttattattttttatatttattctagcaccatatgttgaaaaattcattgttttcacatctatttgacgtcaacttttatcatatagtagttgtgtgtgtgtgtgtgtgtgtgcacgtgcttgcatgtgtaaatctgtttctggccttcctatttttgttaactgaataccatactattttaattattgtagtgttgtgatgtgttttactgtgtgataatacaaaactttccttactcatttattactttctcccacaataaaaatttaaaatattactgtagtttcatcattttcttgcttctttcatcttcagtgatttcgaaaaattagtttttttcatatgaacttagccttttagactgaggtacttaatgttcattttacttctttgccccaatcaattttgtattttaatcatgcttagcatggcaatttttcctctaggtagctttctgtctatccttccaagttgaagtccaggtattcactttctccacagagcctttgtcaatactttcaggctcaagggaactgtttttcttaactttgatagcaattattgactataccactcatttttacctggcaaatcctacagaatcacagagagtgaaatctggaagctacctaaggagatcatattgtctatgtatgccattttacaaatgagaaaacagccaaagagtatggaaatgatttgtccatggtcaaatgtttcaacttctgaagtaaaattatgatataccgctgtatcattattccattgtattttgatattcttttcatatgtcctgaaaatacccagttacttaaaaaataaaatacctagttacttaaaaaaacaaaaaacctagactggaagttccttaaaggtagcacctgcatgtacttttgtacaactcatagaactattattgtgcttgtgtttattagacacctaatcaatattaatagatgttggtaaaaaaacaaattgttccattaaccagatgtcaaactggggctatctccttgtgggcgccactgttataactgtatagaaagtggcatctagtggttggtgtgcgtattacaattgcctgttttgttttaacctatgagtaccagagtcattctcataacctaggtggaataaatagactataaattaaaattttaaattgaatttaaacacatttatctataattcacaactgttttaatctgtgctctctctaaagtaaagctacatgttaataaaaaattgcaaaaaattatacaaaattacttgtaaaatgacatgcgagagtatttaaggttttgcttgtttataaattatattaggagttaggggctatcgttggatactgagaagtcaaaatgcaattataaagaaaggtcacatagaaacttgttcatatcaatgaaatcctgtcaggttattgctttgcattatttttaggagcttaatttgtatttaaaagaagaagatctctcaataaaggctgaagatggaaagctacactgtcttctactcgcaacaacaaaaacccatgcacatatattcacatataaagttcagacatgcatttcagtgtcaaatgttaattattcttacattaacagccatttggggttatcactactctttacctctccattaatgcatgagtgttgacaatatgcacaatttaattcagggactacgactgttgacagttactgtcttgtgaacttgtgaatcagtatcttcttgtgaaacggtatcttctaaattttataaaatccatagtctggaacttaaaatttatgtttgcagaaaaatattatatatttttaattaacctctgtttcctgcacattgtaatataattttttgtagatgggttcatccttcccattagagagcaatgatgtactttgtacttctacttgcacctaacataacatagtggctgtcacataacaggtgatcaataagtatttcttgaattagttacacatgttggagggagctgtgtgttactcatcttagaagtctagtgcctaacaatttttctgtcctctagtaatattcaattcatatttgatgaatgagtaagtctgaataagcctatttaatctgtagtgtagttagcgtaaaatactaaaatcagtatataacccccaaacatctatgaataataaataatagcggcatagcagactttctgtttgacgtgtcaggagcacagctttcactggagcagcctcttgtagtgtgagtgagagattactgcaacatcaagccattgtagtttgctcttataatcaggaaaagaggtttcagtatgaaggtgacttttagttgcagctgagtgagttaggagttctgaccagaaggataaggtcagtactttcaaaagggttgaggagggtactttggtagtgactagagtaaaggaaatcatggaatgttgagcagcaggctaaggtattttatatcaaaggccctcaagattgatgggcattatttggtatttatgtcacatgaaggtttcagtaactcagtctggtatctatctgatgaaaagaatgccacctccttgtaagtaaacactgagctatccatgtatattaaactaacttgtttttctaagcagttcattttctaagagtaaaggatagtactgaatggcagaagtcacatactgtattcttttcctctataggttttctattttggaggaggatatttttctggcttgaggacctcaattcctaatatgattgaatgcctgtttagaacatctagactgtgggagcagcatttatggtaaagctgttagagactgagctattattagtgatgaaggagtaggagcaaagaaaagaaagaaaggtggtaaaagatagtgttatatattttatgctccatgattgctcatgaatggagagaaacaagtgacttgaagtggtaggcattgttgtctagttgccaaggtcattgctaatacagagtgagaggtaattttttacaagcaatgttagaagaaaaaaaggagagttcctgagagtttggacatgtggcaaatcatattacagggaagttgtatgaatttcttttccatttttaacatattttagattgtgcatactgtcaacactcatgcattaatgaagaggtaaagggtagtgataaccccaaatggctgttaatgtaagaataattaactttgaaatgtatgtctgtactttatatgtgaatatatgtgcatgggtttttgttgttgtaagtagaagatggtgtagctttccatctttagcctttattgagagatatctcatttttaatgtcttgtaaaatgatatttttcactttaaaattataaaaattatgtttgctcattttgaaaagttaagacagaagtgtatataataaaaggtgcaagcttcctgagaggtaactgttatttgcaatttcgtatatcttttcagatatttttctggtatctatctttcaagtttggattgttgatttcagttgagctgtaagtcagagtctgatttttgggttcatatttaatgattttttccctctttctcttccttataggcttgctatgggtgttctccaggatcaaagtgtgactgcagtggcataaaaggggaaaaggtgaggtcttagattggcatttgaaaatttagtaaagccagtaaactaatggttttaataaatatttttttaaaaacagagcttctatctcagtacttaagtaagtgaaatgaatcctattgcattgcttattttagagagcttataaggattagattatatcttaaggtcagcaaagattttctgtaaaaggccatatagcaaacattttaggatttatgggacacatcagtttctgtcacatattcttatttatataaatagaactttaaaagtgactaaaaaatattcttagctcttggatcatagaacatgagcctcttgggatctggatcaggacctctttcccgtaacatatttctggcgaccacagaagggactatagtgcagaaaccctagcttaatggctacctttgggtaagtgttggggtcctttaatatctgcatttggcctgagagctataatctgccaaactctgattggtcttgttgaaggcactgacttacttaataggcaaagacaggggaaaaacacttaagaaggaaactaaacatttatcaagctactaatctctgccagataccaggcaatatcatgtatttttatctagtctatgcagtttaataatagatgaaagtctttttttttgttttttcgtttttgagacacggtcttgctctgtcacccaggctggagtgcagtgtcacaatcaaggctcactgcaacctccgcctcctgggttcaagcagttctcgtgcctcagcctgccaagtagctgggattgtaggcatgcaccaccatgcctggcttatttttgtatttttagtagagatggggtttcgccttgttggctaggctggtctcgaactcctggcctcaagtgatctgcccaccttggcaggggattccaggagtgagccaccatgcccagctgaatgtttatttctatcttactttttccacagcagcatctcctattgtacagatattatgattacaaagtaagtattggtgaagattatatagcataagcctaatcactatcagtgaatgacattaatattatcaaatataaaagggatagtaaattatagcctaaagagagttatactaggagatgggatcatactcttgtctccactctttggggctcagtatttttgaatgaatgagtgaatgctgctaattatatatgaagcagtttaggacagtatgtctagggcataatctacttagaggtatagaaggtacgttagcatattagacattcttaaaagttctggagcaaagaaacctatttgtttgttttgtaatgctacatttccaagccccatttgaccatgttatagactttccccttaacagagcagctattaatattaattggatagtcttctgcagaacacttatttgagtaacattagtttgatgggagtagtttcgcagtaagggtgctttctgtagtggagaaaataccaagagggattaacttcatataatagtagagtgatgtttatcagattaacttttgagataagaatggaatactctggacaaaatataacagctacttgatagtacaagagaataaccaaaggaaaaagaggagaggcatctgcacttgaaagaaaggaaatacactgggcatatttgcatttatatggcttttcccctgagtacagcccttagtctgcatggcaaaggaaggctaaaacccagacaaaaacccatggtcttactggcttgagtcagcagagttgaggatgccagaatggctgaaaagtgaagagggatatactggaatgtagggaaacacattggaaagagctcaaaaaattgcttatagattccatccaaattcttgcttgaatcctgaagtttataactatagaggaaggttcatacaacccagcaaaaaggaacagctggaagtctgcaataactgagcatagatttaaccgttgtccgttgaaaggagaatggagttttaagttcaagttcagctgagttaactatactatttcttaaaatagaagtttaatcaatactcttcagaggaagttaagagaatccagaatctctccatattacctacaatatccagtatgcaattaaaaattaccaagtaaaagtgatctacagtcaataaaaagaccaatcaatgaaaaccaaccctgaactaacacagatgttggaatttgtagactatgatttaaagcagaaaatagaaaaggaaaatctcctcatgatgcgtgaccaaataaggaatcacaacagagtaatggaaactgtattttatttaatttttttttattgttatactttaagttctagggtacatgtgcacaacgtgcaggtttgttacatatgtatacatgtgccatgttggtgtgctgcacccattagctcgtcatttacattaggtatatctcctaatgctatccttccccccacccccaccccacaacaggccctggtgtgtgatgtcccccttcctgtgtccaagtgttctcattgttcaattcccacctatgaatgagaacatgcagtgtttggtttcttgtccttgtgatagtttgctgagaatgatggtttccagcttcatccatgtccctacaaaggacatgaactcatccttttttatggctgcatagtattccatggtgcgtatgtgccacattttcttaatccagcctatcattgttggacatttgggttggttccaagtctttgctattgtgaatagtgccgcaataaatatacatgtgcatgtgtctttatagcagcatgatttataatcctttgggtatatacccagtaatgggatggctgggtcaaatggtatttctagttctatatccttgaggaatcgccacacagtcttccgcaatggttgaactagtttacagtcccaacaacagtgtaaaagtgttcctatttctccacatcctctccagcacctgttgtttcctgactttttaatgatcgccattctaactggtgtgagatggtatctcattgtggttttgatttgcatttctctgatggccagtgatgatgagcattttttcatgtgtcttttggctgcataaatgtcttcttttgagaagtgtctgttcatatcctttgcccactttttgatggggttgtttgtttttttcttgtaaatatgtttgagttcattgtagattctggatattagccctttgtcagataataggttgcaaaaattttctcccattttgtaggttgcctgttcactctgatagtagtttcttttgctgtgcagaagctctttagtttaattagatcccatttgtcaattttggcttttgttgccattgcttttggtgttttagacatgaagtccttgcccatgcctatgtcctgaatggtattgcctaggttttcttctagggtttttatggttttagatctagcatttaagtctttcatctgccttgaataaatttttgtataaggtgtaaggaagggatccagtttcagctttctacatatggctaggcagttttcctagcaccatttattaaatagggaatcctttccccattgcttgtttttctcaggtttgtgaaagatcagaaagttgtagatgtgtggtattatttctgagggctctgctgtgttccatttgtctatatctctgttttggtaccagtaccatgctgttttggtgactgtagccttgtagtatagtttgaagtcaggtagtatgatgcctccagctttgttcttttggcttaggactgacttggcgatgcaggctcttttttggttccatatgaactttaaagtagttttttccaattctgtgaagaaagtcattggtagcttgatggggatggcattgaatctataaattaccttgggcagtatggccattttcacgatattgattcttcctatccatgagcatggaatgttcttgcatttgtttgtatcctcttttatttcgttgagcagtggtttgtaattctcctcgaagaggtccttcacatcccttgtaagttggattcctaggtgtttcattctctttgaagcaattgtgaatgggagttcactcatgatttggctctctgtttgtctgttactggtgtataagaaggcttgtgatttttgcacattgattttgcatcctgagactttgctgaagttgcttatcagcttaaggagattttaggctgagacgatggggttttctagatatacaatcatgtcatctgcaaacagggacaatttgacttccttttttcctaattgaatactctttatttctttctcctgcctgattgccctggccagaacttccaacactatgttgaataggagtggtgagagagggcatctctgtcttgtgccagttttcaaagggagtgcttccagtttttgcccattcagtatgatgttggctgtgggtttgtcatagatagctcttattattttgagatatgtcccatcaatacctaatttattaagagcttttagcctgaagggctgttgaattttgtcaaaggccttttctgcatctattgagataatcatgtggtttttgtctttggttctgtttatatgctggattacatttattgattggcgtatgttgaaccagccttgcatcccagggatgaagcccacttgatcgtggtggataaggtttttgatgtgctcttggattcagtttgccagtattttattgagaatttttgcatcgatgttcatcagggatattggtctaaaattctcttttttgttgtgtctctgccaggctttggtatcaggatgctgctggcctcataaaatgagttagggaggattcccttttttttttattgattggaatagtttcagaaggaatggtagcagctcctccttgtacctctggtagaattcggctgtgaatccatctggtcctggactttttttggtttgtaagctattaattattgcctcaatttcagagcctgttattggtctattcagagattcaacttcttcctggtttagtcttgggagagtgtatgtgttgaggagtttatccatttcttctagattttctagtttatttgcgtagaggtgtttacaatattttctgatggtagtttgtatttctgtgggatcggtggtgatatctcctttatcattttttattgcatctatttgattcttctctcttttcttctttattagtcttgctagcagtctatcagttttattgatcttttcaaaaaaccagctcctggattcattgattatttgaaggatttttgtgtctctatctctttcagttctgccctgatcttagttatttcttgccttctgctagcttttgaatgtgtttgctcttgcttctctagttcttttaattgtgatgttagggtgtcaattttagatctttcctgctttctcttgtgggcatttagtgctgtaagtttccctctatacactgctttaaatatgtcccagagattctggtatgttgtgtctttgttctcgttggtttcaaagaacatctttatttctgccttcatttccttatgtacccagtaggcattcaggagccggtcgttcagtttcatgtagttgagcagttttcagtgagtttcttaatcctgagttctagtttgattgcactgtggtctgagagacagtttgttataatttctgttcttttacatttgctgaggagtgctttacttccaatgatgtggtcaattttggagtaagtgcggtgtggtgctgagaagaatgtatattcttttgatttggggtggagagttctgtagatgtctattaggtctgcttggtgcagagctgagttcaattcctggatatccttgttaactttctgtcttgttgatttgtttaatgttgacagtggggtgttaaagtctcccattattattgtgtgggagtctaagtctctttctaggtctctaaggacttgctttatgaatctgggtgctcctgtattgggtgcatatatatttaggatagttagctcttcttgttgaattgatccctttaccattatgtaatggccttctttgtctcttttgatctttgttggtttaaagtgtgttttatcagagactaggattgcaacccctgcctttttttgttttccatttgcttggaagatcttcctccatcccattattttgagcctatgtgtgtctctgcacatgagatgggtctcctgaatacagcaccctggtgggtcttcactctttatccaatttgccagtctgggtcttttaattggaacattcagcccatttacattcaatgttaatattgttatgtgtgaatttgatcctgtcattatgatgttagctggttattttgctcgttagttgatgcagtttcttcctagcatcaatggtctttacaatttggcatgattttgcagtggctggtactggttgttcctttccatgtttagtgcttccttcaggagctcttgtaaggcaggcctggtggtgacaaaatctctcagcatttgcttgtctgtaaaggattttatttcttcttcacttatgaagtttagtttggctggatatgaaattctgggttgaaaattcttttctttaagaatgttgaatattggcccccactctcttctggcttgtagagtttctgccaagagatccactgttagtctgatgggcttccctttgtgggtaacccgacctttctctctggctgcccttagctttttttccttcatttcaactttggtgaatctgacaattatgtgtcttggagttgctcttctcgaggagtatctttgtggcgttctctgtatttcctgaatttgaatgttggcctgccttgctaggttggggaagttctcctggataatatcctgcagagtgttttccaacttggttccattctccccatcactttcaggtacaccaatcagatgtagatttggtcttttcacatagtcccatatttcttggaggctttgttcgtttctttttattcttttttctctaaacttctcttctcacttcatttcattcatttgatcttcaatcactgataccctttcttccagttgatcgaattggctactgaaacttgtgcattcatcacgtagttctcgtgccatggttttcagccccatcaggtcctttaaggacttctctgcattggttattctagttagccattcgtctaatcttttttcaaggtttttaacttgtttgcattgggttcgaacttcctcctttagctcaaagaagtttgatcatctgtagccttcttctctcaactcttcaaagtcattctccttccagctttgttctgttgctggtgaggagctgcgttcctttggaggaggagaggcactctgacttttagaattttcagtttttctgctctgttttttccccatctttgtggttttatctacctttggtctttgatgatggtgacatacagatggggtttcggtgtggatgtcctttctgtttgttagttttccttctaacagtcaggaccctcagctgcaggtctgttggagtttgccggaggtccactccagaccctgtttgcatgggtatcagcagcagaggctgcacaagagtgaatattggtgaacagcaaatgttactgcctgatcgttcctctggaagtttcatctcagaggggtacccggccgtgtgaggtgtcagtctgcccctactgggggttgcgtcccagttaggctactcaggggtcagggacccacttgaggaggcagtctgtccgttctcagatctcaagctccatgctgggagaaccgctaatctcttccaagctgtcagatagggacatgtaagtctgcagaggtttctgctgccttttgttcagctatgccctgcccccagaggtggagtctacagaggcaggcaggcctctttgaggtgcggtgggctccacccagtttgagcttccaggctgctttgtttacctactcaggcctcagcaatggcagacgcccctcccccagccttgctgccaccttgcagttcgatctcagactgctgtgctagcaatgagcgaggctccgtgggtttaggaccctccgagccaggcacgggatataatctcctggtgtaccatgtgctaagaccatcagaaaagtgcagtattagggtgggagtgacccgattttccaggtgccgtttgtcccctcttcccttggctaggaaagggaattccctgaccccttgcacttcccgggtgaggcgatgcctcaccctgctttggctcacgctcggtgcgctgcacccattgtcctgcacccactgtctgacaatccccagtgaggtgaacctggcacctcagttggaaatgcagaaattacctgtcttctgcatcgctcacgctgggagctgtagactggggctgttcctattcagccatcttggaaccacccattttggaaactgtattttaaaaaggaaaatttatatttgaaaagcagaatataagaaaaaacaattgaccttatgggcttaacaatagaatggagatgtcagaagaaatagtcagtaatcttaaagataaatcagaagaaacaactgaatctgaagagcactgaagagaaaatgaaaaaaagaaaaaacagaataggaccccagtgacctctgtgacagtgtcaaatggtctaatacaaatataaatggagtcctctaaggacaggagagaaagaacagggaagcaaaaagaagaataaattatggggcactaagaatggcaagaattctccacacttggtgaaaagtataaatttacagatataagaagtccagcaaacctcaagcaaagtaaaaacgaagaaaactatacctaggcccatcataatgaaactactgaaaaaatagagattgaaagaaaatcttgaaaaaagctagagaaaaatttacaccgtgtatagtggaacaattatacgaatgatgacagacttctcatcaaaaagattggataatgtacagcaatgtgaaaacatcgttagagagctaaaaaaaaatttgcaagcacaattattatatacagttaaaatatacttcaaaaataaaggcagatttaagacattttctcataataaaaatagggaattattcatgaagaggcttgcattaaaataaatataaagaaatttcttcaggctaaggggaaatctcactagatggatgtgtgaatttataggaaggaatggaaagtaatagaaatggtgtaaatgcgggtaaatataagaggattatatctcttttcctctatttatttaacagaaagcactgtttcaagtgtaacaacagagattcaaaatacatgaagccaaaactgagagaattaaagggagaaatagacaaatccacaatcatggttgtgattctaacactcctatttcagttgttccactcttaacaacttaggctttattgacataaaaagagcccaacatcaaacaactacagaatataatttttttcaagagccaaggaattttcaccagtgtagactatgtgataggtcacaaaatgagaccctctaaataccaaaagattaaaaatatcagtatattctcttattacaatggaatgagtaagaaataaataataatatttgtagaaaattcctactatttggaatttagaaagcactgttctaaataactgctggaccaaggaataaatcaaggaaaattagaaaatgattttagttacatattgttgaaaactgaaaattttggaatggggttaaagcagggcataggtgggaaatagatttaaatgtctatgttagaaaagaagaaagatttaacattggtgacctatgtttctcactttagaagctagaaaaggacaagcaaattaaatttaagagaatgaaggaaataataaagacaaaagtaacaatatattaactacaaaaaaaatagaaaacacagtcaaaatttggtaattgatagcacaaaagatgataagaaaatagaaaacacaaattacccatatcaggaatgttcctacagccattaaaagatcaataagggactatcataaatcactttgtaacaataaatttgacagcttaggtgaaatggacaaattccttaagaaacatacattaccaaaaacaaaaacaaataaatgcgtgagtgaaagaaagaagcaaaatataaattagccctatatatactaaggaagttgaattatcaacccttccaacttagaattcctgttccagaagagtttactgatgaattctatgaaacatttttgcaagtgacagtgtcaatcttgcataaatttattcagaaaatagagggatattgaatgccctccaattaattttgtgaagcaagcaaagccctgataccaaaaccaagcaacgacaaaattacagaaacagaaaacgacagactagtatccctcatgagcatagatacagaaattattaaaattttagcaaatcaaatccaacaacatataaagtggatgattggttgtgaccaagtgggatctatgccaggaatccatgtttggtttaacatttgaaaatcaaaaattgtgactcactatattaaagaccaaaacaaaatttagagcataaatatataaacccccaataattatcttaatcgataacaaagaatgcatttaatgacattcaatatccatttctaataaaaattactcttagtaaactaggagtagaagagatttcctcaaccttaaagggcatatgccaaatccctaaagctaaaattgtactcaatggagaaagactgagttcctttctcctaacttcaggaacatctgctctcaccatttctattcaacattgccagtacagtaagacaagaaaaagaaaagaaaaagtatccgtattgaaaaggaagaaataattttttttgtttttttgatgatgacatgatttttcaatgtagaaaatgttatgacatatgctaaaatactcttaaaacttataagtgagtttagaaagatcacagaataaacaaaaccaacaaactaagatcagtaaataaaaatcggttgtatgagcaatggggaaataattccctgttcaataaatggtgctgtgataactgactagccatatgtagaagaatgaaatcagacccctgcctttcaccatatacaaaaattaactcaagatggattaaagacttacgtgtaagacctcaaactataaaaatcctagaagaaaacataggaaataccattctagacattggccttgggaaataatttatgactaagttcccaaaagcaatttcaacaaaaacaaaaattgacaagtgtgacctaattaaactaaagagcttctgtatagcaaaagaaactatcaacagagtaaaccagcagcctacagaatgtgcaaaaatatttgcaaactatgcatccaacaaagatctaatatccagaatctataaggaacttaaacaattcagcaagaaaataaataaataaataaataaccccattcaaaaatgggcaaaggacatgaacacatacgcctcaaaagaagacatacatatgggcaacaaatatgtgaaaaaattctcaatgtcactaatcatcagagaaatgcaaattaaagtcataatgagataccattgtctccgttaaaatggctattattaaaaagttagaatggctattattaaaaagttaaaaacagatgttggtgaggttgcagagaaaagagaattcttacacattgttggtgtaaatttaaattagttcacccactgtagaaatcagtttggagattctttaatcagttcagccactgtagaaagcagtttggagattttttaaagaacttaaaacagaattcccattcaacccagcaatctcagtactaggtgtatacgcaaagtaaaagcaatcattctactgaagagacacgtgcactcatatgttcatcacagcactattcacaatagcaaagatggaatcaacctagatgcccatcagtggtggactaaagaaaatgtgctacatatacaccatgaaatactatgcagccataaaaaagaatgaaatcatgtcctttgcagcagcatggatgcaactggaagccattatccttagctaattaacacaggaacagaaaaccaaataccacatgttctcactaataagtgggagctaaatattgagtacacatggaaataaatatggcagcaatagacactggggactactagtgggggaagatgttggggagactgttgaaaaactgcctatcagtacgacactcactacctgggtgatgggatcctttgtactccaaacctcagtgacatgcaatttacccatgtaacaaacctgcacctgtacccccgaacctaaaagtaggtaaaaaaaaaatgttatacaaatggaatcataaagtatgtaactttttaagactgacttttgtcactctgcataattcctttgagaagcatccaagttgctgcatgtatcaatagttatttcctttttattgcttagtattccatggtatggatccaccaaagtttgtttaaccattcacccattaaaagacatctgcttttgtttttcttttccaatttgggaatattatgaataaagttgttatgaacatttgaaaaaaaatcagtcatatgtccataatctaacaatgaaaagtagtaaattggaattataatagtgccatttaaaataacaacaaaaatttgagatacttaggaataaatcagacaaaaatgtgcaagtctcataccctgaaaactacaaaaaatattgcggtgagaaataaaagaagacctgaataaatggagatatatatcatattcatgaattggaagactcaatattgttaagttgacaattggccccaatttatctatagattcagtgcaactccaatcaaaattcttgtggttttctggggctacaaatttaacaagctgatcctaagagttagatggaaatacaaatacagcttttataaaaaacaatgttggaggatttacagtacacaattccaagacttagtataaaaccacagtaaacaagatagtgtgctattagccaaatgatagacatatagatgaatgggacataatagagactcacaggtaaatagtgaatctgttttttgacaaaaatgcaaaggtagtggagaaagtcttttcaataaatagtcctggaagggttgcatatgcgtatgcacaaaaatggctcacactttatataaaagttaactcaaaatgcatcatagacctagatgtaaaatctaaaccttaaagtctttaaggaggaaacaaaggggaaaatccttgtgactttgggttaggcagatatttcctagatctgatatcaaaaacacgatccaccaaagaaaatactgttaagttgtatttcctcaaaagtaataacttgttctcctctaaaagtattgttaaaagaataaaaagataatccacagtgcaggaaaaataatatttgcaaattacatatctgatagaagacttgtatccagaatatataaagaactctaaaaatttaataataaaacatacagctccacataaaatttaattataaacaaattggaagaatattttgacacttaaataaaagcagatatatagatggcaaatagatacacgaaaagatcctcaacattattaattagggaaatgcaagagaaaaccacaatgagatgccaccataaacctgttagaatatctaataaaaacttttagccaaagcaagtatagatgagaatgtggaagcaactggaacaattatagattattggtataagtggaaaatgatctacacagtttggcaatttcataaaatgttaaacacctattaaatgaccctgttgattcctaggcatttacccatgagacatcaaagcgtatgcctataaaaacttgtacttgaaaattcatagtagctttatttgtaatagccagaaactggaaacaactcaacttcccatcaacaggtaaatgaatcaacacattgcagtatacctctacaatggaatactactcaacaataaaaagtaatgaactattgatattcaccataacaagtttgaatctctaagtaattatgctgactgaaaagttagacaaaaagagtacattctttataattccatttatataaaattctagaaaatgcaaattaatctacagtgacagaaagcagatctctaatagcctggggtgggtaggagtagggagatggatataggcataaggaagatatgggcacaaagaagcttttgtaatggattggctatgctcattattttgattgtggtgatgatttctgtattagtccatctttgcactgctataaagaaatactcaagactgggtaatttataaacaatggaagtttaattgactcacagctccgcatggctgtgcgacctcaggaaacttacagtcatggcagaaggcttaggggaagcgggcaccttcttcacaaggcagcgggaaagagaagagtgaggagcaaagagggaagagccccttataaaaccatcagatcttgtgagaacccactcactatcaggagaacagtgtgggggaaactggccccatgatccagtcatctcacaccaggttcctccctcaacacttggggattatgtggtatacaactcgagatgagatttgggtgaggacccagagccaaatccgtttcactggtgtatatatgtgtcaaaacttttggccaggcatggtggctcacaactgtaatcccagcactttgagaggctgaggcaggtggatcgcttgagcccaggagtttgatatcaacctgggcaacatggtgaaaccctgtctctacaaaaaatataaaaattggctgggcatggtggcacacacttgtagttccagctactcagggaggctgagctggcaggatcacctgagcccaggaggtataggctgcagtgagctgtgtttgtgccacagcactccagcctgtgcaacaaggtgagatcctgtctcaaataaccaccccccaaaacaaacaaaaaaccccaaacttttaaaatagtatactctacgcatgtatgatttattctatgttaattatacttcagtaaaactgcttttaaaacatatgtttttaacatagaaataaaacatctagatttccctaaaagaaatgtgtccaagtgcatattaataaacaaagaaaacttgctagacccctgatgagatcaagttaaccagttgacaatgtaaaatctgtgacacaatcaaacattaactaaacaaagtgtgcctctgtcagtggcatcagcatttactgggcgctggttagaaatgctaaatctcaagctttgcagctgacctactcaatctaactctggtgtcagggccaggtaatgtgtgttttaataaggtctccaagtggttctaatgcaagctaaagttttatatctgacttagagtatctccattttgacagtcgccaaaggtctattttcttgttctaccaattgtaatacatcaaatatttctagttctacataactacaaaaacaaaataggtattatgcaaaaaagagaaccgaattgcctataattgcattacctaattaaattatcattttcatttattcattaagggtcttgccttctccacatgtttatataaatatgttcatataatgtctgcatttttacaatattataatctgaagtaattttaatctcaattattattacagcagtttgtcctattttgtatttttcctatcctcagaattctaatattttcctgtttaatttttcttccttgagaaactattcttaaaatgcttttttattttaaagtggcatgattatacaactgtcttattgtcattataaagtgcgcttcctgaagatggtaacacttttatggatgcctttaactcacaaactagtctacttctcagtacattagatttttattcttcttaataaatgatatataaaccactaaaagttatcctttgtataatttcccctagccctaaatcttacatgtttttaacttttgacaaaagtgtatgccatatattttatttaatccattaaggaagtttattcattgaatgagaatttactgagtatttgttctgttgggcactaagaatacaaagttgaagaagatataattgattaatgaagtagtaattcgaggggagttaaagttattacaaatttctggctggggtagttgggttgtgctatttcctggaatggagaagacagtagaacatgaattcagtgttgtttatatcaagtttgttcttaggaaaattacaaaatttttccttgtcctgattcttcatatataaaatggaaataataatgtctacctcatattatcattgagagtattaaataagataaaacatggaaagagtttagagtaattatttggtatatagaaaacactaaatacatgttagctattattattgtcattgagttttaggtgcctgtatgcattcaagtgaagatgtttcagacagttgcctatgagagcctagttttttagtaaaaagagttgatattttagattcccgggtaaagagagagaagatcaaaaaaggaatccagtgtaataccagtatttaaaggataggcagagagagagaaatattattgcacaaaggaaaatacgaatgatatttttatgcaaatatgggcaggcagcataaaccggttttttttaagtttgacctttagaaatagccattttctgtttgtgagtgttagcaaattacaggaaaatctacagtagttgtaaggattaaacgagtgcctaacaacaggcagcaaagagtaggcaacaacaaacgtcaaccttccctaccatatgtattaggaattaggtggaggatcccatccccaccacatcctcgctcaaggcttctataatttctacttagtaaccttagtacctttcaaaggctgtggtattgatctttgaattccttttgctactgtctggtagttgcccttctctcttctttactataatattgctcactctgctagataggaccatgatattatttgactgtagtgcaaggagatttcaggatatatcatttataggtatatggttttattaatatcaacaaaattaagctttttagcacctccacttaaaatttttagcttattcctctcttatctgtaggcgagatagcagttttgcttctgagaaaatatggctttcttcaagtattatcctccagttttggcagagatatgctgtaaataccagctgagatcccaaaatgtacctgttttcccctcatgaaaatctactgtaactagattttttttcctttgtgctttctttctgactgaaacttgtgatcagatttctactactagctctgccagtaataatttgagggaatctagctctaaaaattttaaaacttttaatttcttcctcttgttttatttcctcaaaaacaattgtgttgaggttgatgaatactaaattatcataatttaaacactaattaaaacaacaaggggatatatgtctagaaaataagaagtgtagtaatatgtcagtaataattattgtcaaaactacaggaatgttgccatctatcattaattgactaaaattagcttcattaactttgaaatgaaaagtggaaactgaccagtagtcttttcaaagtacttatatttattataggatgtttgttgaattattcagcataaaatcatctaagctttttagactaaacttagtacttacaaaacacacacacacacacactttcagagtagaaataaaagtgtgctgtaccttaacctctagagatatgtgtcttcaatggccccttagtcagccacctagtagatatggatgctttctctttctcacgtgctgtccaggctgtcactgtgggtaggatctgttaagagggttcccagaatgaggtctgaccagaggcagccttcgagccttagaaaagtggaggaactacttgtaaccctgtagttgggagcacgtgccatgaagctgtccttcggggttcttttatatatatatatattttgtactttaagttctagggtacatgtgcacaactgcaggtttgttacatatgtatacatgtgccatgttggtgtgctgcacccattaactcatcatttacattaggtatatctcctaatgctatccctcccccctccccccaccccacaacaggccccggtgtgtgatgttccccttcctgtgtccaagtgttctcattgttcaattcccacctatgagtgagaacatgcggtgtttggttttttaaagttggaaaccatcattctgagccttcggggttcttaaacttcatagtgatgaattatctttgtgtaactggatcccctagttttggagtttacacccttactaggattggctatatgcagattaactaaccctaatatgttaatccaaatagcattagtacacatgctggctctgcttccccacctttctgactgtacagatattcacatcaggcaaccctactgtaaaggtgctgataagatatgatgggtcctcactggtagataggcagtcttcctgtcctggtgatgataaaggctgcggttagaactgagacctgagtcacaattcaagtaattattctgagtaaaggaattaatggtggtattttctttatacttttgttttctacattgaatatgtattcatttttagtattaattttacaattagaaaaagtaataaaagttttgatgttttgaaggtttttttctggttaatttcaagtctgggagcttctctgatggtttccttttacccttccctgctccatacttatttaatgtaacccttacagatctggtttcctggatttattgctatcttccctattaaactcttgatgtcagtatgtttaaatctcatttcatctctgatatgctttttacttttacaagaaagaaagagattaccacatatgatataacttccagacggtttgtgttttctccccccacatcttaacaggttttcccatgttagtagatactgtgaatttacataattaaattaagttagttttgtctagatagtcatgtgatctttttgaatctcaaccatgcctgtgcttgaaaattcacaaatgaccttacctttcattctcatttaattgcagggagagagagggtttccaggtttggaaggacacccaggattgcctggatttccaggtccagaagggcctccggggcctcggggacaaaaggtatgtatcatgttgccaaccagtaatgccagatgaattaagtcatcttaaatgtgggactaggtgtcacatcaactaaaaagttactgaattatagcaagaaactaatatgtaaatgaaacaatggaatgacggggagtctgtactttattgtattttgttaaaaaactaaatattactgccatattcagatgcttttggaagatgctgttgattgtttgtagttattggctgccttcacaaaaattaagttctgtcaagagcttagctgagctggagagagctgaattaccagttgttagagtagctgattaagagaagaagccaaaatgaaagtaacagtcaaacctttactcacttactgcaatattataagcagaaagttaaactggagaaagtgctgactcccccactgttctatttgtccccatggtgcagcatcagcaaaggtcagatggatcagcacagatgttggaaatcatttgactgctgagggagctcagaacgaaaagctcctgcagttgtatggacccaggggcagggtgggagaaggagaagagctaggatggaaacgtactgaatcagagtgcagaaaaagtatttttatggtttctttctcctctcataagaaggtctccaccaaaagaggcctttaaatgcagaaatgcagttgagcacagccagccatggtagcctgaatctttgactgatacttcagagattgcagtgcattagctgtgcaccaagtttgctgtgtggagggtagctgtcccttatgaggcctaccaagaggactttggttggacccgaacagtcataggtgtttagacaagagccatattctcaattccataccttgatttttcaggacctgagtgagaaacataagctgccccatcatggacctgaatgggttggactttaaagggctctgtcaaaaaacaggataatatctgaggccacagtagattatggtcatgatcaatcatgttctaagcaggatgaacaggcctgcttggagaactgaatgtaagcatgagccccagctattgccaagccagtaatagatgtcccatagcccacttgatctacgttagagagccaggaggcttttttcttaagtcttatgatggattgttctactttgccagttttcattgatctaggtgcaatatgaggtgctggcaattccagagacccctcacagttggccagcaggcagctaagggctatatggttagctaacactatgtgggccaaggagttgaggctagtctgttttgtttccaaagctgaagtaatgtcattaatgacctcagcaagggtcaaagacaggttgcggacaaccttttctaattgagcgatgctcacagtgagaaaagttgtctggagtattcccatgagtagacagtaggtaatgccagctggcaattctcctgaataaccggagtctatctagttttggagttctcattttgttttatgtaatgttatatgcttaatgggagggactgttttgaatatttgagtatctcttatcaatgtcctattatgtatgttacattggtaggaatgttgaaagcctgatttttataaaagaaataataccccaagaagagtgcacacagttctgggaatgtaagagtcattggttaccatggagatcaaccagccagaagtccctcctggtgagcagagtacttgagtggaattgaaaaatttgtgtaaggtggaggcagaaatagagaaataaattgccaccaccatcgaggccaaaatggctccaatggcagatcatatgtcccttttcccagataattcaattgcttccatatgggacaggagtgagctgacatcccaggaggtattttcttcctgtggtatcagagtcaattgttgcaatctgtcagatccagtgtaataaagttagggtacatgaagtactaaaatggtccatgtttagagaaacgtccattcgtaatattcagcagcacagcaatcagatgtttatctgcagggttcagcgataggtgacatatccattagtttgtcaaaatcagaatcttgtgaactacccgggacaggcaatcaatgaatttagtaaggtggaagtcacaaggttagtctgtaggagaaagggaagagaggttagatccctaccttccagccccatggatcagccccatggatcagctcatggatctggaggtagtctcaacctatcagttgtggggactctgtcttttgactgccatgtgggcagtctgtcctataccatgagcaagaatagcatctcaatgtgcatattaagatatagaattggaagagataatagtgaacttaagactcagagaattttctgggtttttttttttaatgactcttttggcttagtgcctttttccatctgtattaggtagactgatgaattgatatatgaaagggctacttctcctcatttgcctggaaaggaaaactggcttaaaaccctttttcttaattttattattttatatgatggtggtacatcatgttgttacaatattaaggaaatcaaatggatactcaccaggtagtcttccagtaaagggagaaaattaatttaaatgcatgaatattttttaacacttaactataatcagagcttagatttggggagaatgttggtcatgatctctgggaaaataggattacatcaggtagttttgttagattcaagagcagaagggacctgtgctaaatttcccaagtagaactttagtacttagaaaacagcaggaccctgaatgtgtgcatacaattttggtggatgaactactcagctgaatttcctgtgtctaatggcacatcaagagcaagagcaacagaatgattcttgtgcacccaggagtagcacagaagtatcagagatatctgaaagagtcaagtggatggaattgagcagtaacttggcagcaatctatgcatactattggcatggaacaactcaatgaataccagcttggactacactgtcacactcctcaacatattggagctagttaagttctccaaaacttagacacgatcttgtgaaaatgaggtggcaactccaatggactgagattaaacttcagccatgttatagaaataggtgttttggaagagaaattaagttaagctacaggaaaagttacatttcttgtatctgagtttacttgggattagggactgagtttcttgcaccccatgcttgctgagagatggtagttttaataaagatttgtattaaattaaaataagttacctaaattagaattcctttgaaataatttagtattaactaggactattctacaataacatgatcatttataaaggtgtgcttgtatgcaggttaagtttagaaagcagtccaatctttttttgtgatttcatttcagttatctaaaaagagagaaggtaaactgctttctaaactttcaggattctgaatttgaagcattgtgtacttctgcatccagtatgactccatgtttccccaaatggctgaatttataccttttatgtgattgggtattctggtacatgtgtatgttaacatatatactaagtcaaaaaacttgtaggagtattctttaatatgcacactcgcaattttccaaaggttttttattctaaaaaatcaaatttagttaattttgataggcagtacgttcatgtcactcaagttaagagggtatacaatgaaagatctccttctcacctgtgtccattagtccctgagttacccacacacactttaaccacctttgtttgtaaaatagtagcacattaaacacactgtttgacctttgtttttaatttaatatacattgtagacatcctattatcaatatatacagaacctcctcattttgtataactgcattgtatttcattgtatatatgaaccataacttagcattgtatgtataaaccataaattattaagccagtcccctattgatgattatttaggtaggtttcaattttttgctattaaaagttcctttttcttggagcagaattaggttttttaattctatttttttaaagaaaatagttaacgaaaactcagtgaggtaagactaaattctcagcaatgcggttgtgactagaaatgggtacatatgttaacatacacacatgggtaggttcttttgcatggaactgacagctaggaaggaaagtttatggttctttttaaatcgttcttacgctctgccaatacaaagtgcattataaaacaaagcagaggtttgaaaacagcaaattcaagaacagcacatatttaggctcagagatgatgctcattataccagcatggcaagcagattaacataatatgggaactgcccagattttcagctcctattttgtttacgaataaattatttggggaatgactatatcaatattttatctttgttttcttgtatgattcataattaactgtacaggtatagagtttgattcatatgtcagcgatttccttctcaggaaataaaggcctttcttattttgggtcatacaatttacctcagtgctttcagtctcaataataaatgcttcttccttgggtgtataagtttttcactaactttcacagatgtttacagtagtttaaatctcctattttataattgaaaatgagttatttgaggacttttttgacggacaaaaacctaaaaatattgcatttttcagggtgatgatggaattccagggccaccaggaccaaaaggaatcagagtaagtagtattttctctatatcaaatactttgttggtggaaacagatagagaacaaatgaagtattatgagacaattggaaaagacccatattaaaagccaagaagataaatacagtcttcaaaaagttaaatttaagagttggtatatgtctataactagcacttctttagtattttgatagctattacatatatttttatatatatgtctatttaatataaaaggattttaaagtagcttatggttgagaattatgaaagtcctaaattctaaagtttgtcatttaattaaaaatctatatcatatagttggtttaaaccagaacttcctaaccagtgtgattatctcagcctaggtccagaaggctggttacctcaggctgtgtatcctcctagtgtaccatgtataaacattatcatttttttgtgtatctagaagagaataagtttagtttaaaccactgtattaaagaataactatttttggaatactgcatttcttcaaatctaacgtgcatgacttttcaagtcttgaggctctgaaaaataaggatgcatctcaaaattgaaatgtacatttagtataattttttctcaaaagcttttaagttgacatatgtcttacagtgtattttacaactgagaggaaactgtagtttaaaaaatagtactggcttttaaaaaatcacatttagctttctgaccctcagtttcttcatttgttaacttaagagagctaaagagaacaatctccaaggtcccttttagctctgaaatactgtgttcatagattgatgaagctctctaatttgaaaataaaatatatagttggtgacatagcatgtttacgtgtgtgacaaagataaccatttgatcatcagaaatttagtagatgcataattttacaaacattaaaaacattctgtttgctatatacttcttaacatcatgtagcttgccttatgtgcatcttgtgactgatacggatagggtactggagaagcagggaagaaacttaaaacccttagtttatttcagcagacataattctttatttttctgttaaaaattgatatcaatatactattaaagctctttataataataaaaataatttttaatatccctatagttaacattaactatattctatattctaagcactattgagactaaaaagaattggctattttctcagtttccattgcaggtgtttgagattgcttggatactccatgtccctcaactagaactccaagagtgcttgggaataggtggcctgatagtttctgcatcctcaggtgtcagctcacaggcaattcttgacacgcagaattttgaagacattattgtggaaactgataaatgtatacaaatgtacagagcatatagtataatgaacccccatgaacccatcacccagcttcaaaaatgaacaacattttgatagttttgtttaacatataccttaccactttattttttgaagtattttaaagtaaatccctcacatcattcattctaccaatgaaaacttcagcatgtccctctaacaaccacgtaacaactaaaccatcatcatacctttaaacattaggaatagtttttcagtactctgacgttcagtccacattgagttttcctcagttgtctgaaagatgtccttttacaatggtttattcaatttacaacccaagcaagttccacgtattgctttgggttgctgtttattaagcttgttttactatgccatcagaaaaactgggtcattgtactgcattccacattctgaatttggctgatttgtttcctcatgatgtcatttaaattgttcctctgtcccccatatttcttgcaaatttcacgttgccttggaagaggcactaaagaactttctgggggtacagaactgtacgcttaagattagtatattttgctgtgcataaatcatactgcaataacattaaagaaaataggaaaaagtatactttataggtagtgttgtgaacttaactattgaataacattatgcagcatgaatatcaggctattcttcttttttttttttttttttgatgttaggtttgatcagtagtctcagataacattagcctgattctgccatcaaaaatttccctgtcaactttgactaatgatttggcacccatggatggtcattattttgctcagacttgcaagatgctgatttttaaaattctattaatcattcatttattagctggaattctaataggacaatgagttgctacaccagaaacttcaagtggtcatcaaggaaaattcttcaactttttttttttttcattatatgcacatggaatttgtgtgtttcaatcaattttagtcatttttttgaaggccaatttgtcccatcttttgcctgtgaaagccttttaaagttgactcctgtcctgtgctcttttcagaaaactccattgatctttcataacttctccctttttgacacaacaagctctttcatgctcatccttggcatttcccctttagatctgaaatgggacatatctctgattccaggttctttttagtgaaaaatgtgatttagataccacagcctgaatgttagggttttttttttttctttctttcttttttggagacggagtctcgctctgtcgcccaggctggagagcagtggcgcgatcttggctcactgcaagctccgcctcccgggttcacgccattctcctgcctcagcctcccgagtagctggggctacaggcgtccaccacaacgcccggctaattttttgtgatttttattagagacggggtttcactgtgttaaccatgatggtctggatctcctgacctcgtgatccacccgcctcggcctcccaaagtgagcggtttttattgctactcgatttgtcactgtttcaatgtcttctcagtggaaatatgtatttttaagagaaaaattaacatgagttcatattattgcttccaattgcaatttaaaattaagaaaggttttgtatacttattatctcttcccctcatctctctctctattgaggtgaaaatgttcattcctaatatcataaatgtaatttcttatttgctttttcctacaatatgcctatttcctacaatatgctttaaaataacaatgtataacttaacaaaataaaaatttaaattttaatagtgatgataggataataggattcttgaaaaccattaattatttctttgttgagttttccccctttgaattgaccagttttgctaaagaattagagttaagataccatgtttgatgaaaggcacttgaagtaattcttttctctgtatggttttgtcaacaacttgaaacagacgtacactggatccaatttatttttcatttttaatgatttcctttttaccttttttaaaattttaaattatttaaaacatctacgtggttttataagacaaggtgtagtcagagatgcttctctttcattcttgccatttccctagtgttttaatcttcctctgagaggtaatcattagtttttacatagtaatcatagttttacattatgtgaatgtgccataatttatttagtcatgttcctattggtggtcatttgagttgtgtattagtctgttctcacactgcttataaagacatacccaagactaggtaatttataaaggaaagaggtttaatggagtcacagttccacatggctccggaggcctcacaatcatggcagaagatgaaggaagagcaaagggacatcatacatggcagcagacaagagaaaatgagagccaagcgaaaggggaaacaccttataaaaccatcagatttcgtgagacttactatcacaagaacagtatgggggaaaccacccccatgattcaattatctcccaccgggtccctcccacaacacgtgggaattatgggagctacaattcaagataagatttgggtgaggacacagcaaaaccatatcaagttgtttctaattttaactataactggttacatggttgtttctaaactttagctataataatgctgcaattgttaactttgtttctcatattttgtttcataatttctagggtatcttcaggacagattcttagaagtgaaatgctaggtcaaagggcaaatgcatgggtaattttgctagatattttcaaatttctctccatagagtttgaatcttcattagcagtatatgagaatactttttcaccatagtctcacctacagagaatattgtcaaacttgtatttttgccaatcatgacagagaaatttaagaattttgggggtgatcactattaatgtcttcagtggaaatatatttgccactcccccatcccctgctgaattaatttttcatcacaaacctgggagatccttatccattagaagagacatttcatccacgaatttgcctgctcctaataagtgcaatgaagacaatgctccctcaaattgaagtttcttttatagttttcaataaaagagacttttaaacacatgtaagagatttttctctaatgtttcaaagaacaatgagtagtaataaatagtgagacacaatttttccaaatctattctaaaataattttcataatatccttaggtaggatattattttatttttatgggttgtcatttagtttaaggattttatttcttcttatagggtcctcctggacttcctggatttccagggacaccaggtcttcctgtaagtagcatttcactttttactttgaaatctcttgaaaagtaatctaagacatattatacatgtgttatgtcgcttttcaaagggaatgccaggccacgatggggccccaggacctcaaggtattcccggatgcaatggaaccaaggtgagatccatccatttaatcttgggtagtatacttgacaataattaacttaaaaacctaaagaaatcaatatgaagaatgtagaagaagggatatagtgtcttcaggtcttggctattacataaagtatgctctgactataattttctatatattgaactatcaataatttcattaaacatgtataattagctgggatattgcattgggttaaagattacttaccaaacccttttttgactttagcataaagtaggatgagaattaaaacgaaattaggatatatatgtttcaaatattatatcaattgttgaaagtaatacttctgaatgtcattcatttgctttgccattattaaaaaactaggtacaatttatgttttcaaatatttcatgtttttaagattttttaacacgccgaataacttccttaagaaaaatcttaaaaaattatatgtaatacagcacatccgtttttactataaactgtcagtatgaaacctgaaacttcttcatcagcaaagatgatacatttaacaattttaaataaccctaactttagatatagcaaacatttttttttctgatccaatgtttcttctctttagtcaactgttggattgaatataaagtaatagataataagaaaaaatgaggaaaatttgctctgcttgtaagcttacaatattatagccaattcttattccctcccctttctccttttcctttaggttaatgcaatatattgttattctctgtattttcttttggtattttctgtttttcacataatattctgtaaaactattcataaaataccttaggtccttctttctttctttctttgtttttgtttgttttttgttttttgttttttgagacagagtcttgctctgttgcccatgctggagtgcaatgtcacgatctcggctcactgcaacctctgcctcccgggttcaagtgattctcctgcctcagcctcctgagcagctgggattacaggcacgcaccacaatgcccagctaattgttttgtatttttagtagagatggggtttcaccatgttggtcaggctggtctcgaattcctgacctcttgatccgcctgcctcagcctctcaaagtgctgggattacaggtgcgagccaccgcgcccggccagatctttctaactaatggcatatgtcagattttatatagggcatatttttaaaataacttgaacaactattttgcattacagtggccatattttgtgataattactgtactctatacttgaggcagtacagttcttttcatctccagtatttcttcaggtcaatgtaacccttgtcaataataataatttttaaaaaaaattttggattcatgaggactaatcgtgttcttcattttagctagggcaaccttaaagtgataagaccaatgtggagttggtttgcctgatacatttcatgttaaattggactaaatttttgtgcctcttctggttatttgtttatttttatttacttatttatttttgccagtgtgctttaagaaacaaacagaccactaaccaaagtttcaaatttgaagggccaatgtatctataatcagtacagtgtgctatatgattaaagggagcattgattaacttgtgtttcaggcttccaattatgtgagtaacaaattttaaacaaattaaattgatttattatgcatatttttaaagtctgaatgcttttcttatatttcttactatgtaagtaaaagaatgaactttaaagttggagccacaatgtataggtttttttctttttctgtcttttaaacttgatgtctaggccacttcctttctctcgggacctactttttccatgtgtaacaaggtggagagaagggtattggactcacaaagacacacaacagtagtaattttattctttcaaaccttctgatgaagttgtttctaggattaccgtggcatacaggtatttgaaaggaggttgctttggtgttcttctacagcaatttcagcttttgttttctaaaccaagtgtccatattagtactttacagtagtgagtgagaaaagctgggtgcctagaaaacataatgacctgcaattgctagaactattgctattattgtcctcttggtgatattaatggccttctttcttaccatcttttcccctttacaaaaataatttgaaatagtttacaataaaagaaaaatgcaacagagcagttaaaataagaatctatataacacatgggcaggaaatggggcagatcattaactattaaatgtgatgatagaatttatggcgtgatcgtctcaaaatgtctttgttggaagaaaagaactgaggtagataattttttttctttacttctaattgggatagatgaattgggataaaagttgaattgatatggatagttgatattgaagtaattggaaagtgaaggctaatgaactttttggcaatctggcatgtttcaaaatggcttttatagaaatcttttcaagaagtcatatcttgatggtatagttattctttgtttcttgttcctccatgctctttatttttaactccttctagggagaacgtggatttccaggcagtcccggttttcctggtttacagggtcctccagtaagttataaaatttgggattatgatgaacacaggaattaacaaaagaagcagaaatgtagtgagagagcccaatgcattcatgtggaacaaagtaatacattttaaagtaataaactagaggaaaatgtttcaaaaagaagttggtaatatagctttctcctgggcaaaagcaaggattttgtatgtatataaatgtcacctctaagtatcctaaggtatatcctattcagaaatgacgctacagcagtctactcattttatactctatttagaaagcattctgtaattggcgtgtttctctctcatacatataaaataatcccttttctttttaataatagggaccccctgggatcccaggtatgaaggtaagcatctcattctggggaacaaatgttttgaataaaatattaggaaagctggcaacttcaataggataatgactcaaacttctgtcttaaaatcgatgtttctagaagttgtgcaggtgtaaacttacaagctctccttaagtagtctcctgtgttcccatggctttaagtaccttgtatgtgctgatacacttgaaaatgtgtatatcagacttgagtttctttgctgacactttaagtcttcatcttcttacactttgatacagttaaccacttactctctgtagaattacttttttccctggcctctgtgacactatcctttcctgatttttcttctacacctctggttaatttgcagtcttctatgtaaggtcattattttatgtccatcaagcatcaggtcacagtctgtactccttccctgcaatgcccagaaatattactaatgcccatattattgattactatctagttactaaataccaaatgagacttttcttctgagttagctatgtgtattcatcagcctctctgacatctccacatgttccaagttaatccacccacaaaataaacccgctcctccctgtggctcctcatatctcaaatttgcatctttatatgttatgtacacttttacacgatctcaaaacctgggagttaatatttatatcttccattccttcacccaccacctcattcaattccatcactaaacactaagtgtgcctgtaaaaggcaccttaaattcatccacttttcttcattcccactgttaccacgttaatcataatgtctcatctggattactgcaataacctcttacgtagtctctagtctctttttttcaccactactccgcccttacctcccatcctgttttattctttacaaagcaaccaagaatgacattttaaaagtgttcattgataatttaatatgcttataaaccttcaagggctttctactgtgtatctaaggtaaagtccatagtttgtttgtaagaactgcatgctctggtccttgcctacattgacagccttatcttaaaccactaaacttatcccttagctcactgaccacatcagtctgcatttagttattgggatgtgccaaacgttttgcttttagggtcttttgtatatatggtttactttgcctaatattcttcctcctatctttgcctggatgactccttattatccttcaggtcttaacctgaatgttaccttcacagattgcccttctttgactacccaagctaattttctccactagtttttttttttcaattattgtaccatgttatttttcttcatagcccttaatattcacagcccttgatattgtcatcttatatttttacatattagggtctgtattttcccattatattgttagctttatgagaacagaggccttgtttatcttctccattactgattacccagaacctaccacaattgttggcaaatacttaatatttactacatattttttaatgagtaactgaaggtactacactcttaataaatctactgttcttcagtgtactctggccacttcctcattttcctttaaaaggtaaacttatcatttttattactgagatggcctaatcttttagtacatctctgttacaaattgaatcttcagatcatttttctggttttgctggttttcatgtataataactgtgtcttagaacttccattgatggcttcttttagggtgaaccaggtagtataattatgtcatcactgccaggaccaaagggtaatccaggatatccaggtcctcctggaatacaagtaagtatccagtgattttctttttttgctatattgattaaaccagaagattacaacaatccctcaacctttagtactctctgtttttgtcataaaaattatcatcagatgtttactagacattacatgtactttctacctgaaaataaaagcaatctggaccagggagaattttaacaacatcggcttcattcttttgcctttctatccagtgttttggggattggcagcagaaatagggttctatattcttattcttgtactgtggagagcagtagggtcttttgtacatttacaaaagacctaattaaaaataaaaattatggaagtcccattgaatatattaagatatatcatttgtaacactatcagttatgcataatatatgaacatattttgaaggctgaaggaatacagtttatgcatggtgaacatcaaatgtaatcttaagaaaaaaattttagcctacagaaaacatgcatagagagagcagtaacttttgagtatagattaggaggtcaatttcttagggtttatatttcatgataatcgaatcctttgccaaaaatgaaaaatcaaaacttcctggtagtttatcactaagatacaagattggggacttttttcattagctaccttgtcattccttacttgatatcacccatccatagtttttaaaattcactcaatcttgccctttatattttataaattgttatgaagtaatatttgaaaatacaacagaatacatgcaaaatatatgtatgttatgaagcataactataaagtgaacaacatttaagagctagaaaattacaaataattttgaatcaacctgtgtcccccttggtaatcaaatccttctgcattcccccaagacatagctaccatctgtgccttaaaaatagctttattatatatgcatatatttctaagcaatagaatatttagctttgctttataaaataatgtaatatttatgtagttttctgcaacttactttttctacttgatatgctaagattcatccatattattggatatggctttagttcactctgtttcactttcatataactttccatttgtggacatactaccatttggtgttttttgttttatgtggtgtttgttgttgttgttgttgttttgagatagcatcttgcactcttgcccagaccggagtgcagtggcatgatcatggctcactgcagtcttaacctcctgggcttaagcaatcctcccacctcagcttcctgagtagctgggaccataggtgcacatcaccacacctggctactttttgaaaattttcgtggagacaagttctcaccatgttgccaaggctggtctcaaacatctgagctcaagtgatcctcctgcttaggcctccaaaagtatgaggattacaggtgtaagcctctgtgcccagcctacaattttttcattacaaaaaaaaatccatgatttatatctaagtatagaattgctagattgtaggccaaattttcagtttttaacatgccaaattattccataacacttgtatcattctcttataatttatcccagttcctctcatttccctctgtctttaatcttatctattttaaaattagagaagctatcttgaaagtagtagcctttcccttctcattggtagcataaaagccctaactaaatgcatacctttatcactttgttttgtaaattttccttattatttgtcttatgtttatttaccactttaaaccacaagttttcttataattacttaatccttttatccctttgcattttaaaatttcacttataatattgctgaatgataaaattgtagagcagaattccaatgacgactgaagtttaaatgaagtctaaatttcatccatttagttctttgtaagatacaattagggggccgggcacagtggctcacgcctgtaatcctggcactttgggaggccaagtcatgagatcaagaccagcctggccaacatggtgaaaccccgtctctactaaaaatacgataattagccggacctggtggcaggtgcctgtaatctcagctactcaggaggctgaggcaggagaattgcttgaacccaggaggcggaggtcgcagtgagttgagatcatgccattgcactccagcctgggcgacacaagtgagactttgtgtaaaaaaagaaaaaatacaataaggggcttgtttttcttttttttcatcattttctttactcactttataacagggcctacctggtcccactggtataccagggccaattggtcccccaggaccaccaggtttgatggtaagctctcttctttaatttaatttccccccctttcctttctgacttctttcaggaatattaatattatttataatacttgaaaacataatgcattctcaacattcataatttataattttcttatgtaaaggtgactttacaatgatatggtgaataatatgcattctaagtaatggctccattttatagatggaaaaatgaggtatataaaaggaaagatttacaatgaaatattttgttggttgctcttgatgtatcagtgttgaagtcaattctggccatttcagaaagtcttttaaggcagttttctaatcacttgatgaaacatgtttcttcaaactgcaattgtttgtttaagaagagcaaaagcagggcttcataaaaaatattggctctcatttcctaggcgcctgggacaaaacagtagaattggtgaggggagtgatcactatgcaattggtcacaggtttttgtaccccaaaaacttctacagatcctgaatgtgcaaccggttctcttactttactagctctgtagtcactcttattttctatcctagtaaattctaagtatttttacttctgcaatacttagatttcattcaagtcatgttttggacttacagctttgctgttgccctcttaaaagggcaagaaaattgtatttcagtagaagtaatttctcatgtgccactctatctctcatctaccatatatttaagtgacagttttcattatacctttataggttgtacatttttgtttgtgacaattggtcctgcacttttgagtgaaggaaataatgtttgataactgctagaagaatctaccagaaaagattgtgatttctgctttcctgtaactttttgggggaagatgagaaaacccttttgtttgttttagttgtagacttcatgcaaagcatgaaactatggactttcgcactttttcctaattctgctgttggaacattggtgccccttgagtatattgttacaccttgaatttcctcaaccattgtggccacttaaccgattcactttacgtttctggatattccttgaattaacgctaattcaacaggtgaagccaaatcttagaaatgccaccaagaggccaggtgctgtggctcatgcctgtaatcccggcactttgggaggctaaggtgggtggatcacctgaggttgggagtttgagatcagcctgaccaatatggagaaaccccatctctactaaaaatacaaaaaattagccaggcatgatggcacatgcctgtaatcccagctactcgggaggctgagacaggaaaatcgcttgaacccaggaggcggaggttgtggtgagccgagatcgttccattgcactccagcctgggcaacaagagggaaactccttctcaaaaaaaaaaaaaaaaaaaagaaagaaagaaagaaagaaatgccaccaagatacaatatataaataaataggcccattgaggttaagaggcaacatacttgagcagaaaggtgcctatttaattttttaaaccttgaaacattctcagatacacaaagtcatattgtataaaaatcaaactggattttaaaaaataaacacatgctttttagaacttgagagttaattagagttaattgctttatggtacctaagtttacctataattctgatgtgaaaaatttgatgggtctgttgagattaacttttgaattgatttttgacaatggggctacctctctacctctgcccatcccagcttttttctcttgcccatttctattttgtcatcagaggtactcacattcatctagctcattttaatcaattaaaatgtgtgtctctgactaaaatgaaaacaaacaagaaaatactattttgatgggctttttcacaccttactctttctgaaactaaataacttttaaaattaacttattaatataacattttattttctcttttgtcttctcttcttagggccctcctggtccaccaggacttccaggacctaaggtaattttctttttctttatatcttttatttggtgtggattccttttcttactgtcagtgagatttttaaatggaaacttctctctccaggggaatatgggcttaaatttccagggacccaaaggtgaaaaagtgagtaaagaaagagagctggttattcagccctcagctttctctttttgtagtcatttgaactgtctttttctttctcttgcttcttgaagttatcttatcttacatgttatattactgtctgtggagattatgaagtatcaccactgtcttattttatcttgcaaacagggtgagcaaggtcttcagggcccacctgggccacctgggcagatcagtgaacagaaaagaccaattgatgtagagtttcagaaaggagatcaggtgagtaagtagggaggaagtcaatgaaaatcttgctatggatatgttaattagtttgatggtggtaatcacatcacaatgtatatgtatatcaaaacatcacattgtttacaccttagatatatacagtttttaatttgtcagttatacctcaataaagctgaaaaaaataaaatgataaaaagttaaaaataatatttctatgtaagtggaattccattaaaatgcattataagctgaaatgtggttatatataagggtatttttttttaaataacaaggatttgagattattaattttttttttttttttgagactaagtcttgctcttgtcacccaggctggagtgcaatggcatgatcttggctcactgcaacctccgcctcccaggttcaagcgattctcctgcctcagcttcccaagtagctgggattacaggtgcccaccaccacaccctgctaattattgtatttttagtagagacggggtttcaccatgttggccagactggtctcgaactcctgacctcgtgatctgcccgcctcggcctcccaaagtgttgggatttcaggcataagccaccatgcctggccaagatcattaaattttcaaaataactttatcaagatacagtctacatacatataatccacccatttaaagtgtacaattcaattttttttttagtgcattcacagggtagtgaaactatcagtgcaatctaactttagaaaattctgaggcttcctcaaaaaaatctccatacctatgttagttgtactccttatttctccccaaattgaccagccctaggtaatcactaatctacttcttggctctgtaaatttttctattctgaatatttcatataaatggaatcatacaatatgtggtcttctgtgtctggcttcttttacttagcatagtgttttcatgttaaatcactttgcagcacatatcagtgcttcattcctttttatggctgaataatatttcattgtgtaaatagtctacattttgtttatccatttattcatcagttgatgggcatttgggttatttccatttttggctatttgaagaatccattcatgtataaaattaggttatggtaagtcagaatgatgacagtgttccctacatttcactgatatgcaaggagaaagataatgttactctataaacctttgttgtgtttagaaataattatctgataccctgcttttgctagagtagatgagggaaattagatatatttttaaagcatactggcccacactttaacaaacagaatgtgtgcatttttgtttcacttaaatgtgaataagaaagttaagaataaaggaaaagttgtattgaaactctatcatcaatatgaatttggccatttaattatctcccaaaatatatgtatgccgtgtgaccccaaaatctctttgttttaggtattcttgctttttataaaatattttataagaataaaaaattgtcattattttcattttaagtgttgccttgttatttacctcaaatcttggcttgtatatagacaaaaaattaactgaaatgagcaaagatagctctagttaattttgcctagaagatttcaactttaagttagaaacaccctattatctttggttgtactacatgagtattcagttcagtttaatttttttagggggagatttatttttattttattttattatttaaaaaagtcaacctttattttagatacagggggtacatgtacaggtttgtcacataggtatattgtgtgatgctgaggtttggggtacagatcccatcagccaggtagtgaacatagtactcagaagttagttttacaagtattacctgcctccctctactcttagtagtccccagtgtctattgttgccatctttatgtccttgtgtccccaatgtttagttctcagttataagtgagaacatgtggtatttgattttttgttcatgcattaattcacttaggattatagcctccagctctaaccatgttgctccaacatagatgtagctgtggttcagtttattaaaaatgctcctagctagctctagtgcttagaatgaaaatgcatgttccagtattaacattgatttcctttcccctactactgcatagggacttcctggtgaccgagggcctcctggacctccagggatacgtggtcctccagtaagtacctaaagtgctttagcatcatttaatgtaaattggtattggtacacagtatcccatgaaccattgtgaaactatttttatgtgtacagggtcccccaggtggtgagaaaggtgagaagggtgagcaaggagagccaggcaaaagagtaagtgatgtaactgctaatattctttgcaaaaaaattctaaatgtgtgtgtgtgtgattttattctttcttcctacatcttccattgtttcaaaatatcactactgacattataatgttgatgtctaaaaagtctacttaatatagtccaagccaggaataaagcttgttatattctttaactttatgcttcctaactaacaaatgtatgttgttgccctatcatttctttgtatcctatagggtaaaccaggcaaagatggagaaaatggccaaccaggaattcctgtaagtagctaaggttctttccccctgcaaaactggagacatttatgtgttggtataacataaggtggcagagaagcagtatgacaaaaattgtggggtctggaaatagtttaaatgaattgaaattatccagtctttgtcttttgaatataattttcaatttttaaaaaattttgtgagtacatagtaggtgtatatatttatttatgaggtacatgagatgttttgatacatgtatgtaatgtgaaataaggacatcacagagaatggggtattcatcccctcaagcatttatcctttgcattacaaacaatccagttacaccaaatataaatttgaggttcctctattttttaaagtcagatttattgagatataatttacataaagtaaaaggaactatttttagtttacagttctgtgtttgacaaacacatacagttgtgtcaccaccaccataatcaagaacacttccatcaccttcaaaagttccctcatgctcttttttagttatcccctccctattcccctatcccaacccccttataacgactgatcttttgtcaatctctttaattttgcctattcccaaatgtcagatacattggatcatattgtatgtagcctttcgaatcaggatcctttcacataacataatacattgaattgtgtatcagttcatttttttattgctgagtagtatttgatagtttgaatataccatggtttgtttgtccatttacacattgaaggatattttggttatttctgtgttttggccattatgaataaaacttttatattcatataaaaatatttatatgaatataaatattcccatacagtttttttgtgtgtgtgtgaacatgttttttcagtaaaagttttgacaggtaattcttctacttactaccaaaaaggggcatgggaaataaaatatgtaagtccaagaacattatttcaagcagcttcagtatcaagagtatccgcagtaggcaagagtttttcaaagacagagagaatatttgatgaaatttgtaagttattctaagggaaaaggataattcttaacaagacaggttagaattactaaattcagataaattggtttcaggatattttactaaacaggcaatcctcaacttacaatctctagttcaaaaatattttatattataaaatatcaagaggtaaattcagggcctcagttcctggcttcttttggaacaattggtctttgtcttgattcaggcagctgtgatattcaacaattgcctcttagtgttttcaacaaattggggttgcggggtggggaggctgttctcttgttctctgtttgcactgggagaacccaagttgggtcaaataaaggcagccttgcaaatagccttcttttgaaccagcagacagatcaaataatgataattctctggatatggggctttgaaggagctccaaccctgttctttcctctccaattgctgctaggctgctggttttcaccttgattgtgaggagaggtggtgtgaatagagcaagttaaaatgccacaaagctctgagaggtggtgggaatagagcaagttaaaatgccataaatctctgagaggtggtaggaatagagcaagttaaaatgccacaaagctctgagttctcaccaagattcagctttttttttttttttttttctgagaaaacactccttgaattgctgcaagctttggttaagttctgaaagttaattctgactgaccatttttgccagtattctcattgcttctatggagaagacaatctttggagatttcctaacaccatcatttgtgctgatgtcaccctatcctctatgttttaaagggtttgcctggtgatcctggttaccctggtgaacccggaagggatggtgaaaaggtaagaattttaatactttgaagtgactggtttagtctagctaaaataatccttttcttctcccaggcttgagttataaatggaaaaagtctacataactagcttttatattcaaaatatgccttctttattcatcttttgctcatttttcttttataccacacttgctaaattttattccattgccataaatcacagtccatgttgcagaaatacattaagcattgtttaactttagcatttccactgtgaaaagtcattgcctttactttgagcatgtatcggcaaaacttctttttttccacaaagagaattcagcactattttagtgaggtcctcttactaaaaaggcttataactgtgaatgtagaacgtcgccactaaacatttccattctgtatgcaattattgtctgtaagtctgtggctaattctttgttgttttttcccccctactgggccaatgcagtctgactgaggtcatttatttagttacctatttttcaagtgactttgaaagattgtatgaagcatacaattaccagatttttagcagggcacaaaataaccagtcctccaatccctcttgtttttaattgcttcgtatcaaaaactgaaagctttttggtttttcaggcaaggaaggaaaggcgttacaaacttgaatgtacccagaaggcacatattttaatggtggtttatttttaaattaggtccaagttctagcatggcttaaaaggcacaattagaatagatggaggtaggaaatactccgataaaatgattttttgtcaaatagtatttgtatatagatggatggcttctatgaacaagtttagagtcagaatagaagtatgaaaaagaccatccttgtgtcttggccagtagtagagtaacacttgaatattgaatattgtggtttttttcatgctgttgtagctactaatcaaggataaaagttttatctgaacttgtctttcattagcttctaagagcaagctcatgaaagcaattcagatttactagctattattgatgatagttaagtccatcacatctaaaatgtctgtcactaatagaaatggcactacatttatgtccttgactagttttatgagaagaaacatggctaaatgtaaaaaaaaaaaaaaaaaaaaaagtaattttttcactgattctagtgctaccattttttttctattatcttctttatagagtatttgtagttggctagaaataggaatcttaaaaatcaaagaatattacaactagaaataccttaaaactctggtccaaaaatctttattctttctatataaaccagagaagttaattaacttggtgaagattacatagctagtaaatctgagacaccatcacaggttaggcttagctcagaattgtttcattacttcatgttgcatttctcatttgaggtattttatgattgatttctgggtctttttggaaagtttctcttatattcttgaggaaattgatgttttcatgtgaattttactaacctattttacaattgcattgaacagggccaaaaaggtgacactggcccacctggacctcctggacttgtaagttttttttttttagtcttcgtttatcaaatttattaatgcattatcatttttgtgccttaatcgcatactccctactttttcttgatagaacacaaaatttcaagtcattatcaatttctactggcttaaaagtctttacatctaaaatcttcagtaatgttgacctcaaggtctttgtattgttctgcctatgcattacttctgcatggtaaaggtctaaaattatggcattgggttgttttgcctcatgattgccagatcatttctcaagcaaccagcaggtggtgcaagtgttgcttacaaaggttcaatgaaaacaacaacaacaaaacaaaacttggggaagttggggtgggggtgggggattggtcctttcccctgcagagctcaggagaaagatagatttggtcttaataggttttctcaatttgtaattgtctgattcacacttctttctttcctgagtgtgtgctttctagggacttttaataacgcatgtaggaagctgctttatgaaagaataattgagggtggcggagctacagattttctgtcatgtttgtgttcactatgaaatttaagtcaaatatacttccagtcttattaggaataaaatatcattgctgaggtttaacatattggtttttctttggttgaaatttagtaagactcttgacttcaaactgcattgaagccgcaacagtgcgaatgttggaaaacttatgtgtccagacatgttagtaacattaacttaattcgtattatccataatgagtctcagttattaatacttaggactgtactaaatctaatgaggatatacttaaagaagatcttagatattttttattcactttcattttaaaatcagcttcagtcctctaggaaataatctctttataaaatgagaagataaaattttaataagtatcagaagaaatggaaattttgagagtacagtcctatttagcagcctagtttcccttttgaatcactattccaatcttaggtcccacaactttttgtcttcttttgtgtgaatatttcttatatccatccaatagagacaggatgaaatatcacactgctattaggtgttgatttgtacatcagactggcagtctcttaaatctgaagttcatttacctttataggtctataagaagaatttgttaatatttaatttatttaatattaagttttttaagaaaatacttaatgagttacaagaatacagagtaaaaagaaatgattagttagttgggtttaatcaataaagaacatgggttttatttttaaatttttttggtatatagtaggtatatatatttatgggggagttttcttttttaaaggaagaaataaatgtgggttaataaagagaaagattggggaaaggcattacacatgtttggaatgaaatatgcaaagacatagacaagaacgtgcaagttgaatgaaatggttagaatcagacagacttcactataataaaaatttattgtaagacgtagtaggagattaaataggtgagagaagtattggaagtgagaggtgacttacagttcaggattaaaagtagcagcacttatagtaaaaagtagtgagcaattttgagtccttaagcagaatagttaacacacacacacaaatggtttttgaggaagcatatcctaacaatagattggaattcaagggacaagatcagaggtgcttctattactctaagtgtgagttgataatatagctgtggcagcagaaatcaagggagcaaattggagagacgttttctgtaaagaattgtcaggcttaggagattggaatgaattgaatgtgaattataggagaagagacatcaaaaatacttttagttttatatgcttcgggctcaggaacatggtaatgttgttacttgtattggacattttctaatcagttggaggatgggagtgatacaaaatgtgactcataaactatgtgaaaatgatgacattgtaatcatatgtagctcccataatgttttcaggagaacaaggcttttcttctttgcatttctttattttttttttctttggtaataaaggtaattcctagacctgggactggtataactataggagaaaaaggaaacattgggttgcctgggttgcctggagaaaaaggagagcgaggatttcctggaatacagggtccacctggccttcctggacctccaggtaaatgagattgcatttatggccttgttcttatagcatccttactaatccatgtatactttttatcacattagttccatggtcagcatggaagtaggagacacaagtcctttttaattgacagatacttcccaactcttactataccttctctcaccatattactcacttgtactttaaaaaagcccaagtgaatagtgtcctttaatcctaagattcctatttctacattttattttttattgatacataattgtacatatttatgggatacatgtgatattttaatacatgagtccaatgtataatgattaaatcaaggtaactagaatatccattacctcaagtatttatcttttctttatgttgggaacattcaaaatcttctcttctagctgttttgaaatatacagtaagttgttgttaactgctgtgaatctactgtgctaccaaacactgaaacttattgcttctatctaactgtatgtttgtacccattaaccaacctttcttcatttcccccgacccttcccagcccctggtaaccatcattctactctccacctccatgagatcaactttttttttttaacctcctacgtaagaatgagaacatgcatttgtatttgcctttctgtgcctggtttatttcacttaacgtaatgtccttcaggctcatccatgttgctgcaaatgatagaactccgttcttttatggccaaataatattccattgtgtatttataccacatttcctttatctgttcatccactgatgaacattcaggttgatttcatatcttggctattgtgaatattgctacaataaacatggaagtgcagatatctctttgaattactaatttattttcttttgaatatatacccagacgtgagattgttggaacatatggtagttctatttttagttttttgaagaacctccatactttttttcataatggttgcattaatttacattcccaccaacagtgtgtgagagttccctcttctctgcatccttgcagcatctgttattttttgtctttttgatgatagccatattaactggggtatattttattattaataaattacaccaaacaattcttaatttagtaggcaaatcatcacacttttcatgctaatagggaaggatattctccccaagtaatgcctagttttgcaagatttcctgtataaaaatggcaagcagcgttatccacctaaaatttcagaaatacctaactagaaatccccatggtgattttgttatacaataaaatcttagagctcaatactgagttttatattattccctttgaaaacacacagtatagtggaacatttctaatttggccacaaattgagtactgcccttatctagaatgtttatttgaatgttctctgaaatagggtaataatagtgatttccgtaagatttctagatgcatgtggtacagtgcctggcacacatacatattcaataaattattattccttttccttcaaaaatacgtggctaatgaaatactaaaatgatgagatgagtgatattcagtgatctttcccaagagaaagaaaataaatataggttccattatgctctaaatgcaaacttcagattcctaaatgtgaacttcagattcctaacctcaagatagtgaattaaatacagactgtatctggaaaattgaaataaagaattatctcaggatgcagtaaaagagataaggagttgggaagtatgaatgaaaagttaagaggtatgaaagataaacctagaagctccaaaattatctcatgagggaggtcaaggaggagagaatgggacaagaggcagcatttgaaaaaaaataatggctgagaacttccatctattaaaaaacacatgcatcactatgaaaaagctcatgaagcactaagcaatagtaaaataatagtaatgcaaaggtccataactagacacattgtagggacatttcagaattcagggataaaaagaagctcttaaaaactatttgagaacaaaaggccaatcacctacaaagcagtgagtcagaggatgataatggagcacattttcaaagtgataaggacaaattactatgaattagggattctgtattacattaaactatcatcctaatgtgaagatgagatacataggaagtttaacaccttcagactgtctctgaaatagttactggaggttttactccaaaaagaaaaaagggaattctggataaaatgagaatagcggtaggatgcaagaaccaaagcttagaaaatatattagtaaagcatattaagtctaaatcagtactggttattttttaaaaaggtgttttaagtaacaacttggagctataattgtaaacattattaacgtgatgtgtagatgcagagagaataaggataagagtttttgtcttgttagggaaagataatataaatcttgttaactgtataaatttttagaaatgtatacatgtttaagtacataggttaaaatgttaatagtagccactagagaagaatagaaataaaatgtataacatacacaccaattgaagaaagaaaatgactaaaagtctcatatatagtataagttaagatgggggcaaaataaagacaaatctgggtaaatagaaaataaaatataaggtgacaagaagaaattaaaaataagtcagtaactccaacaaatttgaaaggactaaacactgattaaaagacagtgactaaaataaaattgaaattaaaaatacctatatatagtgcacagtagacatatctaaagcaaagtgacagatacaatctgaaaataatgcagtatatattgggcaaatgctatacataaaaaagctggtttagcaattctaatatagtatgaaatataattaaattcaaaacttgaaactataaaaattctagaagaaaatgcaggaaaaacttttctggacattgacctaggtaaagatttatgactaagacttcaaaagtaaatgtaaccaaaacaacaatagacaattgggacttaattaaactaaagagcttctgcacagcaaaagaaacaatcagtggagtaaatagcctacagaatgggtgaaaataattgtaaactgtgcatctggcaaaggactaatatccagaatctattaatataaggaacttagacaaatcaataagagaaaaaaataaccccattaaaaactgggcaaaagacatgaacagaacacttcttaaaataagacatatatgtggccaacaaacatgaaaaaatgcttaacatcactaatcagcaaataaatgcaaagtaaaaccacaatgagatactaacacattagaatggctattattaaaaagtcataaaataacagatttgggcaagaaataatttcagttattcagagaccatctgattatctaccagaaagctttaaaaaatccattgacaaattcccagaacttaaagagaatatgtgtgcaagatggccagatctgagtagcatacttaatttgccttcctcttcaccagcaaacgtacaagagaaaaaaatacacttcacaatagtaatagtattaaaattcacagtagaataaccccaacaatacatgtgtaagacttctttgcagaattttgtaaattattattaaataatataaaattactaaatagagaaataaatttaattattacttgatgtgaaaaaccaatataataaacagttgattctaccaaaaaataatctttaacttcaaattaatcccattcagaatcccaaccagtttttgaaaatgaaactgaaaaatttatttagaaaagtaaatttgtagatggttttaaaaatgaacaaagatgagcgtattttccttagcagttttgaaaacattataaagtcatagtaactaaaaagtgtgttaatggtgcatgaatcaccagtgtaacagaagaatgtccggaaacagagccatgtttatatggtaactttgaaatacctttttatcttgctaatgactttccggtatttttgagattataagaacagattgtcaaaggatggggttactagtaatttccaaaagtagtaaacctactttaaattattatttcctaccctcaaactgttacttacattctttgaaacttttcaacctttttttcagacttttgagtctcatagaaaaaaaataacataaccagaattatatgttaaaggaagatcttatcattatctaatgtctcaatgagaactaaagtaacatctctaagatgaaatcattttgatcacttttttgaatcttaggggctgcagttatgggtcctcctggccctcctggatttcctggagaaaggggtcagaaaggtgatgaaggaccacctggaatttccattcctggacctcctggacttgacggacagcctggggctcctgggcttccagggcctcctggccctgctggccctcacattcctcctagtaagctatatttttctcctattaagttctatttttgtttttgtttattttgtttataagtaactctagctaaaggttggcctcatttgttgcgtttctgatatctaagaaattctaccactgcttctgctttttgggttttggtagttcttggatgtttacatttgctcttcatatagtatttatcagcaatgttatattttccttttgcttataggtacttttatttcttcagagaataggtctttttctggcttgtcaggctttcttttgtttaatcttctggatatttcacaattagcttgctatcctttctttatcttactcaggtgatgagatatgtgaaccaggccctccaggccccccaggatctccaggtgataaaggactccaaggagaacaaggagtgaaaggtttgatctccaaacatattcattccttcattttcttcattctttcaaatcatcagcaaaatcccctgtatcctccatcacaccttagccactgactcccatggtcataccccaagaccatctcattaccaatagtgttatacttacatgaccttggtttcatgcatcccattttttggatcgctctcttctttctagcttactacctctagtaacctgactccagcaatactccaaccccactgagacctagcaactttgactaatgcttaactttttgatgtcctttcttccctcttaaccttgcttaagttccattatcaatcactgtaatcaattccattcataaatccatgattcctttgcccttctctcacttcattgcactcacttggaacaaaagcataatccaaattttcatgttttctgagcctacactttctcttctcttttcaagttttaacagttcctcccctattcttaccttgcttcctacttcactgaccaattaaagcaataacaagagaactttcactgattgctaccaccatatttacttacctacttgcacctgtgcccatatagtctcccttcttgcatattactgttactgctcctatctaaagccagttcttctatttatacaatagattccatttcctcttatttccccaaggattttttttccagcaatttttgcctctccgacatcaccaatttttccctctctattcagtcattccaaggagcatacaaatatgcttttttcacctatctaaaaaaatgtaatcctacattccctgccagctgtttctctatttttctattctcatttgcaacaaaacttcctaagaattttctcctcattacctctagatactctcctcttgttttctcttaaacatactccaatcaagatttcatcccctcttcccccaactccccactgcctaccactccacaaatgctggtcagtcaccagcagtctatatcctactaatccaaatgtcaggtctgtcctttttttgcttgctttttgccttctttaaacatttgcatcccttagctttcagtacatttcctgttttttttttttcattcctctgtggtgtacatatatgtgtgtgtgtgtgtgtatgtgtatccatgtaattaccatctaaaccaaaatatagaacattttcaggaccctggaagactcttgtgctccctactcagtatcccccaaaggtaatcactattttatcctctggcatatattaatttgcctaatcttgaactttgtgtacatggaattatactgtatgagctcttttgtgcctggtttctttagctaaatatatgtgagatatatctatgttcttgtttgttgcagtatttttccaccattctttgttttccactgcacattacctcaatattctaatgttgatggacatttggtctggagctattgtgaataaagctgtcataaatattcttgtacgtgtattttttttgtaggacataaacactaatttttattggggatatatctggaaattgaattgctgggttataggttaggtgtaggttttgtttcatagatattaccaaaccatgttccaaagtgattttcatttgcgtttgcctaatgacttgattatgaactatttccttacagtttttatattctcttttgtaaagtgcctgtctttatctttaatttgattattggatatatgtattaaaactatcttctgttttgttaacttttgtttaacaaaagttgctaattaaatgaaatcaaattaattaatttcctattttatcgttagtactttttatgcactgttttagaaatctttacttatctcagaggcctgatgatattcctctgtgttttcttctagacactttattgttttacctttcacgttttgatctttcttcaattaatttttgtgtatagtttggagtagggatcaaagttcatttttcccatatggatgtccagttgactcagtactatagaacaaaagatcatcaattaccccaatgaattgcattagcactttttgtagatcacatgaccatatgtgtgtaggtctgtttctgactgctctattctgttctgttgtttcattagtctctctttgcaccaatacgatactatcttaattactgtggctttattgtaagtgttggatattctaggttctttgcattattttgtgtgcatcttagaattatctatccaacttttaagtttaaaatgctccaaggttgagtccttgttcttcttttctatataaactcatttattcagtcttgtgactgttaataccacctaattgcccatgacttccaaatttatgcctcctatccagatataactcttttcctctagatttgtgtatccatttgcctagtcaacattttgaacttgacatcctgatcaaattgaagtcttgatttctgccacctcctccccatagttgctgcactcacatcttcagcttcttacttaaaaagcaggccactttagccttctagttgctcatgctgaaaaccttggagtcatccttgattcccctcttcttttgtatttcatatatgatccatgagaacatctcattggctctactttcagatatgtctataatctaaccggttctgatcattttcattgcagtcactttgaaatgagctaccaccatctctctcctagatcattgcaacagtagccacttaagtggttaccctgtttccatcattgcctttagaggctattaacatagcagctagagtcatcccttaaaaacttaagttataacatgttgcttttctttttaaaattttctactagattctcatttcactcacagtaaaaaccacagcctttatatttcttatatgcctatatgccattcgttataaactgtcaactttctgaccttgttcccctccctcattctgctctagcaatctggtctgcttgctgttccttgtatataccaaacatggctattctttctgcttgggatgttctacactcttatgcacatgtcatgtcctttaagttttatcatataacaacttctcaatcaagtctatcctgactaccctatttaaaattgcaaccccccacccttccctggcatactcaataccacttatgtagttctattttttcctataaaaataatatattttaaagcatattaaatatttaatgtatatttaatttttttagacagggtcttgctctgttgcccaatctggagtgcagtggtgcaatcacagctcactgcagcctcaatctcctaaggctcaagcaatcctcccactttagcctcctgggtagctggcaagtacaggcatgcaccaccatgcctggctaatgtttttattttttctgtagagatggggtttcgccatgttggccaggctggtcttgaactcctcatctcaagctatctgcctgcctcgggctcccaaagtgctgggattacaggcatgagctactgcagtctgcctatacttaatattctattaaaatatttcatatatacattttgataattcatttcctttattgattattatccctttcccctggtagagtgtgaggcatgtagacatgaatttttatccatgacttttcttttgctcaccaatgtaacacaagcatctggaacagttcttggcacacagtaagcactcagtaatttatttgtcataaattgattcaggatataggcttctccaatcacaccattaagtggaaatgctgtcccttagtgctaacatttttagaacctatctatagaaggtatatgtacccctttcagtaaaatttgtttgttattatgatttcactaggtgacaaaggtgacacttgcttcaactgcattggaactggtatttcagggcctccaggtcaacctggtttgccaggtctcccaggtcctccaggtaaattatgcctcagggtaaccttctaaatattttttggctagattttgttgagcttatacttttagaatgttaccagtttctcattttataactagtcactcatatctataaagaattaagtatgaaatgcctccatttgttatcaaattaattatgctcttgtttctaatacctgaagctaccaatatattctattaaagcattttgacaatataatttcaggaaatatatcttccccattttccatatggagaagaaaatcacttatacagagtcagacttctttcttccagaatactgggagaaaagttcataatgcctagcccctgagtgtagtttccagtggcagagattccagtcactggggatgtatcacatgttgttgttcaggaataggggttctattggagtttggcaatcaactgccagtattcctctctctctatatataacacatctatccccctttccagtcaaaactatatgtgatatctgtcagaccctcaactgtttcatttaactgccccttaggtatcccagtattctcttgaaattacactttatgtttgagtcagggctgagaatagacaccagatctcttacctttctgtctagtgagtctactaaggacaccaattcatttggaggttgggaatactttcaacaaatcttgtagacattattggacattaataatctagccttgtacctctagtctcatggttctcaaacttgagagtgcatcacctggagggcttattgaagcccagaatgctgagcctcactctcaaagtttctgattcagtagacctggatgaaggctcaagaattagcatttctaattagtagccaggtggtgatgatgccactcatccagggatccatttggagaaccactgctttagtaatgtttcctctagtctttgggctgcaaatgtttctcataaaccaaatttcagggaatgacaaaccaaagaaaggactggtaaggatctaggaaaactgcataagtcagaacaaagatattcaaaccttttcattatcttttttctccctttggcaatgggaacatcataggaacccaggaaacgttgtgcatagtatttggcagttgcaaggtctgagaaagtctgctttggagttgaaagtttcttaggatacaatattgtatgtaacatgaaatgttaaatttattttttaaaaaggatgattacctcattttgtgaacataaaaggaaaatacaaatgtgacttaaatgggattgaatggggttcttattttaaaaacttgactttctgacttgatgatttctgtatgagctttgtcaggagttcaagctcaaagcttacgttattgtgtgtgtgtgtgtttgtttgtgtgtgtgtgtgttaggatctcttggtttccctggacagaaaggggaaaaaggacaagctggtgcaactggtcccaaaggattaccagtaagttttgagtatattataaaacaaaaagaagtagaaggaaggcattttacacattgattttcaattattcatatatatacacacatatacaatttaatttttccattaagttgtactttgtttgattccttgactcttcctgactcacatgcctcacttgattcagccctttgtacattaaatgttattggatgggttgaaggggtaaactggagagaagaaaatgttagaaaaaaagaaactgattttctttttctctttcttctttttccactcttttttctttttttccttactcatttcagggcattccaggagctccaggtgctccaggctttcctggatctaaaggtgaacctggtgatatcctcacttttccaggaatgaagggtgacaaaggagagttgggttcccctggagctccagggcttcctggtttacctggcactcctggacaggatggattgccagggcttcctggcccgaaaggagagcctgtgagttggtttgatatttttggttttgtgatgttaaattttcacttagaaatgttttctaagttaattcaaaggatgggactgatgctgagataaacacccaatcaatgcttaaaacaatgtgaccatacagtaatggcacattgttactgactacgtagggtttctgcactactcttttctttcacttgttttgtaaacttatttttcttaacccattaatattgaatactattttctatgaataggtgggcaggaggttaagatgtttatgagacagtataaggttccccatctcttaacccccacatatctttccttgggtttacttaaacctcatgactgggcatggtggctcacacctgtaatcccagcactttgcgaggctgaggtgggcggatcacctgaggtcaggagttcgagaccagcctggccaacatggtgaaaccctgtctctactaaaaacacaaaaattagccgggcatggtggtgggcgcctgtaatcccagctactcgggaggctgaggcaggagaatcacttgaacccgggaggcggaggttgcagtgagccgagattgcaccactgcactccaccctgggcaacaagagcaaaactccatcacaataaattaaataaataaataaataaataaacctcataaccagcagtttaacttgtttctatatatatagtaagcttagagaatagtacaagtagatagccatgttcaatgtgccacagaactgaaagatttaacataaatgaacaatcttattttgtacataacacacagcccaggatatttaggtaggaagtgatattttataatgttatctagactataacctttctgacttacactaaaatgtaagctgcataaagtcagagatttttgtgtatttttgttttctgttgtatcaccagcacttgacacatagtaggagcccaaaaatatttgttggaggaatgagtaagtggaatgatcacacataccatctcataataccactcacttatatagcttttaagaagaactatttatggctatatcctttccccagttgtattcagtaccaacctacagatagttgttgtatctatatgtttctgtattaaacttttccctttttagggtggaattacttttaagggtgaaagaggtccccctgggaacccaggtttaccaggcctcccagggaatatagggcctatgggtccccctggtttcggccctccaggcccagtaggtgaaaaaggcatacaaggtgtggcaggaaatccaggccagccaggaataccaggtaagtttactgtgttttgttttaaacttggtgcttaaaaacagaaatttattatgttttggctactcatggcttcctttcccgagaggtgtgtttccctggccgtttatatttgaactcttcagagcatcttagcaagggatcacaatggtttttataagggggtttctttttaaatcttttctaactgtttcattgttactgttaattttgctctttttaagtacatgatacataatgcaaagtttaataaatagttataacagaagcacacaggtagctaccacacacatcaaaaaatagaatgttaccagcatcctagaaacccctaaccttttctccctgtcatttcctaatcacaatccccttcctcctgtctgctgtcttgacttttacatagttttcttccattacccctctgttttatgacctctgtatgcatttttaaacagagtattttaattttgtttctttttgaacttcatgttaaaggaatcatagggtaagtgttttttatattaacttttcgtgtggctatagtgtattcatttttattgctatatagtatttcattgtatgtatgtttatgtgtgtgtgtgtgtgtgtgttacagttgattgatccattctatggttaatggttaattgggttatttacagttcaggtctattatgaataatgcttctgtttacagtcatatagatagatagctaggtagatagatagatccctatatctccttgtgttcatgtgctcacacttctctagggcaagagttggcacactacagaactacagtccatggaccacatccagcctaccacctgttataaataaaagttttatgtgaacacttccacaaccattcacttttgtctgtggttgtttttgcactacaactgaagagttgagtagttgctacagagactggatggtccacaaagcctaaagtatttactctggtcctttacacaaaaggcttaccaatacctgggctagggtatgtatttaagattagcattttcaaagcataggataagtgcatcttccacttgactggataattacaaactctatccagaccaattgtaccaatttttactaccacaagcagtgttgaatattttatgttgatttacatccttggaaacaatttgtattgtcggacttttacacttttgccaatctgttgagtgtgatattttgcatttctctgattaaagtttagcaccttttcatgtgtttattggtcatttgaatttgcttttgtgaaatgcctaatcaagtactttgaccaattttatattggattatttctttttttattgatttagaggagttctttatatattctgtgcattagttcttagttacctatgtattttgcgaaaagaaatctttacctactgtggcttgccatttttactctttgtttggtgtcttcaatgagcagaaaacaactttcacatcatcaaaattatcaatcttttctctcatggttagtgctttttgtgtcatgtttaggaaatcttttttttcttgagccaatttcaagttcatgtttccattaataagaagtagatatacttgaactttgcacatgtaaaacctaaatgtacctattagccaaaaaaatattttccttgtttactacagtttgatttttaatgctcttttggcctacattttaaaaatacttatataggtaacaccctgttttaggggtttccagagaaacagaaccaataaaaaggatggacagatgggtagattagatagatagatagatagatagatagatagatagatagatagatagatgagaggtgatttattatgggaattgacttacatgattatggaggctgagaaatcccacagtaggccacctgtaagttgaagaactagggaagccagtagcttggctcagtcctagtctgaatgcctgagaacctgagtggctgcttagtacaagtcccagagtctgaaagccagagaacctggagttgtgatgtccaagggtaggagaggatgggtgtaccagtttcaaaagagagagagcagagaattcacctttttttctgcctttttgttgtatccggtccctcagctgattggatggtacccacacacattgggtgagggtggatcatccttattcgtttcactgattcaaatgtcagtttctttcggaaacagcctcacagacatatctagaaataatgctttaccagcgatctcagtatctcttaatctagtcatgttgaaacctaaaattaaccattatacatcttgaatcatggaagtccttaaggctgtcatatcctttttctttttgaaattctatccttctgttttatatatttcttgaatatatagtggaagattgtttttcttgtgaatttttgttagtttacattttcaaaagattgctgataattttcttttttgtttttaattaaaaagagacctttagttgagtaaatacttctcatttaccattgatttactcttgctttcaggtcctaaaggggatccaggtcagactataacccagccggggaagcctggcttgcctggtaacccaggcagagatggtgatgtaggtcttccaggtatgtgaggaatttatttcaaagtaacttcaacaccgatggcttttttttttttttttttgacagagtttcgctctgtcacccatgctggagtacagtggcgtgatgttggcttgctgcagcaacctcctacttctgggttcaagcagttctccctgcctcagcctcccaagtagctgggattacaggcgcccaccaccacgcccagttaatttttgtatttttagtagagacggagtttctccacgttggccaggctggtctcgaactcctgacctcaggtgacccattgcctcagcctcccaaagtgctgggattacaagagtgagccactgcacctggccctgatggcttctttctttgaacgttttcctttcaataactgctgtttctccataggtgaccctggacttccagggcaaccaggcttgccagggatacctggtagcaaaggagaaccaggtatccctggaattgggcttcctggaccacctggtcccaaaggtatgttggaatgggtagcaggcagagtaggttagaagtttagcatgatgttattctctcataaaattcattcaacaaataaaatatattaattgcaccttttttctctgtgctataaagaatgtaaataaaaaatcacagtgtattttcactgtaagttcattatctttatctaaaacagtccagacaagaaaatatctacattttagatatgcaaaagtgatatataagcttaaaaatcacaggaattattgtgttttgtgttcaccatagtattttcagggtttagaacagttcctaacacatagtgtgcacttgatgtttattgagttaaaggattttttaaacagaaaacagacttattgcagatgtgtagccaagtaatgttttatgctaaataatattttcttgatttattgaaatttttagggcttatgcttcagttctgctttattcctcacagaatttattctcacaaatggcaagagcacacagtggtctgaggacagttcttaaatatatctttactcatttatacaaaatgctttcaaaagtatcaggtttgattttatgtgtgtatgtatctataatatctgcagttatttttagatcatttccaaaattatatggtaggccctttgtcatactacatccagatataagcagaagaaaagttcttgggcatttttgtgtgggattcattccttacaatttagttctatcttattatataatagccctcattttcttcagaaaagcatatgttccacatacattagctctatgtgaaaataaaaggaatgtaagatgattgagaggattgtaaggcttaatcctaagtagtagaatgtcattgtgcttttgacatcttactgttgtcactaagcatgagtagaatgtgggtttgggaatttgaatatctttcttaaagtgcctttcctttggtggttaaaaaatgacttatcattttacaggctttcctggaattccaggacctccaggagcacctgggacacctggaagaattggtctagaaggccctcctgggccacccggctttccaggaccaaaggtctgggacatttttctttattccttctcattttcttatctttcccaccttccttatttctagctctctattttgactcagatatcatcccaagccccaagtctttactataaatatacagataacttattatatttccattaaaaaaatatttaaccccaaatcatctttaatagtccaaggtcacatttggagcaaaaaaaaaaaaaaaaaaaacctaatttctgtacctacttttgaatgcccagttctttgattagagaatacaggcataccttggagatattgcaggtttagttccagaccaccacaataaagtgaatatcaaaataaagtgaatcacacaactttttttgtttcccactacatataaaggttatgtttacactatactgtagtctttaaagtgtgcgatagcattaggtctaaaaaaaaccatatgcataccttaattaaaaatactttattgctaaaaaattttagcaatcatctaagcttgcagcaagttataatctttatgctgggggagggttttgactcaatattgatggctgcccactgatcagggtgatggttgctgaaggttgggtggctgtggccatttttttaaataagacaacaatgaagtttgccacatcaattgactcttcctttcagaaaagatttctctgcagcatgtggtgctgtttgatggtattttacccacagtagaacctctttcaaaattggagtgagtcttctcagaccctgctgctgctttatcaactaagtttatataatattctaagtcctttagtgtcatttcaacactgttcccagcatcttcaccagggtagattccatctctagaaatcacttttgctcataagaagcaactgctcatctgttctacttttattataagattgcagcaattcattcacatcttcattctctacttataattgttgttctcttgctacttccaccatatttgcagttacttactccattgaagtcttgaaaccctcaaagtcatctgtgagagttagaattaacttcttccaaactcctgttaatattgatgttttgacctcttctaatgaatcctgaattttcttcatgacatctagaatgaaacccttttcagaaggtttccaatttgttttgccagatccataagaagaatcactatttatgacagctatacattacacaatgtgtttcttaaataataagacttgaaaattaaaagcactctttgatccatgggctgcagaatgggtattgtgttagcagccatgaaaagaacattcatctctttgtacatcaccatcagagctcttgggtgactaggtgcattgtaaatgagcagtaaaattttgaaaggaatcttttcttctgaggagtaggtctcaacagtgggcttaaaatagccagtacactatgctttaaatacatctgctgtcatccaggctttattgttccacttatagagcacaggcagagtagatataccataattcgtaaggccctagaatttttagaatggtacataagcattggtttcaacttaaagtcagcagctgcattagtccctaaaaatagagtcagcctgccttttgaagctttgaaaccagtaatttacttatcttctctagctatgaaagtcctatgagcattttattccaatagaaggctgtttcatcaacatggaaaatctgttgtttagtgtagtcactttcatcaatgatcttagctagaacttgctgcagcttctatatcaaaacttgctgcttcaccttgcacttttatgatgtggagacagcttcttcccttaaacctcacgaaccagcttctgctagcttccaacttttcttctgcagcttcttcacctctcagtcttcagataattgaagttagggccttgctctggattaggtttttgcttaagggaatgttatggctggtttgatcttctgtccagatcactcaaactttctccatatcagcaatagggctgttttactttcttctcattcgtgtgttcactggagtagcacttttaatttccttaaataacttttccttcacattcacaacttggctaactgtttagtgcaagagacctagccttcaacctaccttagcttttgacatgccttcctcactaagtttaattatttccagcttttgattttaagtgagagacatgtgactctttctttcacttgaacacttagaggccattgttgtgttattaattggcctaatttcaatattgttatgtctcaaggaatagaaagacctgtggagagggagagagatgcggggaaaatggctgatcagtggagcagtcagacatttacaacatttttttattaagttcaccatcttatacaggcacagtttatggtaccccaaaacaattatgtggtaacatcagtgatcacatatcaccataacagatataataataattaaaaagtttggaatattgtgacaattaccaaaatgtgacacagagacaaaaagtgagcacatgctataggaaaaattgcgctgatagacctgctcaatgtagggttgccacataccttcaatttgtaaaaagtgcagtgtctgcacagcacaacaaaatgatgcacaataaaataaggtatgcctgtacgatggtctgctccctctgtgcatctctatagagtcatcatcccatgtcatctctgttcatgcctgtgtgatgattggttgaaatggtgttgaatatcatttccagaccttgtatactgttgttctctgtcccaattccattacagatacataatgcaaatcactgcaattgacttagtaatactaataataaataatactgtgtttgagttacttttcattccttttattatttcttatctaatgttaagctttcctgagtcaaccttcagcaaagagctgctgtggcatgtaattatcgtgactatttttatatattttatctctgcgtcattgatttaaacctcctgtgttttgtaattattacttatttttcatgggaaaaacagttaacccgtgacaccagttctcatgagaaaaccacttctctattggttgattctctttattatgaacattttcaaatgaaaataaaagtaaaatgaataatacaatgagctttcacatatccatcacccagattcaaaattattatgattttataacatttgcttcatctagtcctttttactttgcttaaatattttacccaaatctcaacacagtatcatttcacttataaatgcatcagcactcatctctaaataaattgacattttatacaaaaaccacaatgttgttatcatacttagtaaaattaaaaataattgtttagtattatctaatactcagcctataatcatatttccctacaagggtagtctgttctttaatctcatgctctctcagttttttttttttatcctgaaaccagtccaaatcatctaatttgttttactaaaccctgtttccaatccttccatatgttttctccaacataccaattactttttatttaattatcttctcctctccccccatggaaggaaaagtattgtcttgtattttcggcattaaattctctgtggcaaacaataaggacagaaaagtcatgggagtttttgttgtgttttgtcatgtgtatgctcaagggtgaaccaggatttgcattacctgggccacctgggccaccaggacttccaggtttcaaaggagcacttggtccaaaaggtgatcgtggtttcccaggacctccgggtcctccaggacgcactggcttagatgggctccctggaccaaaaggtatggaggctgtcactgcatctcaacttgcttttaacttttatagaaattgacacctttgggaaagtttatgggtgataagcccaattaactggaaaccctatgctgccattctgttactgctacacatttttttcaatccttcattgattatttttgtcttttatttcattgaatagataataaaatcatggcccggcacggtggctcactcctgtaatcccagcactttgggaggccaaggtgggcggatcacctgaggtctggaattcaagaccatcctggccaacatggcgaaaccccgtctctaccaaaaatagaaaaattagccgggcatggtggcacatgtttgtaatcccagctacttgggaggctgaggcaggagaatcacttgaacttgggaggtgaaggttgcagtaagccactccagcctgggtgacagagtgagactttgtctcaaaaaaaaaaaaaaaaacaatcatatatgttataaaagtaacactgagaagtcttccttccaacccatcttcatccactttgttcctctccatcctcctgcttaactattttttattctcctttcttccccccaccctccccccataccccaagacagagtcttgctctgtctcccaggctggagtgcaatggcgtgatcttggctcactgcaacctccacctcccaggttcaagcaactctcctgcctcagcctcctcagtagctaggattacagatgcatgccaccaggcccagctaatttttgtatttttagtagagacagggtttcaccatgttggccaggctggtctcgaactcctaacttcgtgatccgcccgcctcggcctctcaaagtgttgggatccttctggtgtttcttatataaataccagccaagaatttgttttattttctctgttcttaaaggagaaggtattttcttttgactttatttgcactttatttttttactgaaatttgtatcctgaagatcactccatatcagtagatggagatcttaactttttgaaaataggtgcctagtgttaaattgcgtggatataccatagttcatcccagttgctagttgctagattggatttttgccaatcatttattacaaataatgccatagtgaataatctttcatgcatattatttcagatgtgttcaggtataatagtaaaataaagtgatgaaaaaggattttctgaattaaagggtaaatgcatctctggatattgtcagattcctctcaatttgcaccatttacactccacccacaatgtatgagtgtgtttccccacagccttgataagtgagtatgctgacaaactcttggatttttgctaacctgatgaagtaagtaggtttctaagtatatttttaaacattttattgttaaaaaattttaagtactgtgaaaaataatagtacagttaacagctgtatatctaccacccagattctacaatgaaccttttatctccctgccaacgttttgttttttaaaattttaaatataacaaagtagacagaactttattgggactactatatacccatcactgatattttactgtcaacattttactatatgttgacaaatactatatactatttgtcacatatctatccatccctgtctccatccattcatctatttttgatgcatatcaaaataaattacaacaacaatatacttctctctaaatacttcagcatgcataccataactaaaattccatagctgtatattacttttcttctgatatgtaattcacattaaatgagatacataaatcttaagggtacatttactggattttgacaaatgcatacacttgtataacacaaaatctttatcaagatattgttttagaaattttccttatgcccctttccagtcagtccctatcccatcatccacagtggcaactatactgttgattttttcatcataagttatttcgcctgttaactccttataaatggaactccttataaatggaaacatacggtatgtactttctttctgaggcttctttcactcaacataatgttttggagatccatccatgttgttgtgtttatcaatagttcttttctttcagtgaaatcattgagtattttattatgtgactgtatcatggatacctgggttgtgtcaagtttttggctactatgagtgaagctgttaaagacattttttacaattcttttttatggatatgtgatttcattttgcttcagtaaacaactaagagcagatttgttggatcataagtggatgcttagttgtactagaaactactagacctttttccaaaatggtgataccattttaaatttacaccaaagtggttcagaaatttgcattgttccacattttctcaaagtttggaatgttggtaggtgtgtggtagcatcatattgtgattttaatttacgtttccctgatgactaatgatgttgagttcttttttatgtacttgtgagctacttacatattcaaatattttgtctattttgaaagatggtttgtttctcactttattattaagttggaagtgttatttctatgtcctgcatactggccctttcctagatatatgtttattagcattttagccctggctggctgacctgttcatttccttactgtattttgatggataaaagttttaattttattgaagtttcatttatcaattttttcttatatgattataattttctgtgtcttgtctaagaaacatttgcctgccccaaagttgccaaggtattctatgttttattttataagctttatagttttagtttctatgtttaaaactattacacatgtcaaataatttttgttcagcatcatttgtttaaaataatcccctctctattggattactttgggatctgtgtcagatcaaataataatatatgtgttgatctacttctgtgctgtcaatcctgttttatttatttattttgctgtcattaagccagtaccacactgtttatattactgtagctttatagtaagactcgaagtcaggtaatgtaacccaccaactttattcttaaaaaaaaaaaaaacacatttctttggctatattaggtcctttgcctttactctcagagtggtttaaattgtatgtctcttactgtgagtgagattggccatccttttatgtgttaagggccatatttttttttcttgttaactgccaatatcctttacccacttctctgttgtttcttctactcccttgattttgagttatctaataatgagaaggaatagaattagtaaagctgacttgcattttttttcctttgatttggaaggaacccgacttccctcgtcaatgttttggctcctagtgagtaatctgaacagggccatgcttctggaacatgttggattgatttctattaaagcagtaagacagcccaatccaattttaaccaggctagattgtattctgccagcaaaagccccagactagctcaatacaaactcttcttagataagctcttaaaaaaatacctttctgtttttgactaaacaattcaggccagctgtaaactgtaacactcaaagttacaagttgtgtttcccaccagttatctcccctagctgtagacctgtagcaacaaaaattgcagataaagatatttgaaatatgtggcaaacagtcttcctgtggaagttacccacttactgtattttgtttgtatatattcttgagacacagtggtagtgaagaaatgcattgaaggctatttaaacatgaatttaacaggtatttgcctaatctttggaaggaaattaggatatggcattcccatatcctcacaggagtaattctcaattattaaaagccgagtacagttctttaggtgctagaaaaataagtgtttgggatattctgccatgtaactccttcattcttcaaacatttattatgttctatgccagctagtacctgaatcagtagaagctcaaatgcatagtttctgatcttgaagatctcaaggattgctctctactgtgagaaaatctaggtagcatcaccatgaaagtgattatctcaatgggaacttctatgaaaatgtatcactaatattttggatcagtagactacactcaaaactcagcaagcagatcacaataaaagttcacctaccaaacacacacaacacaccaatgaatgggtattagaactcagttactaaactgtaggaaaggttgatgcaacactttcaaaacaatgtagtgaccaataataaattaataaggctaatactcatcatgatatatctatatgaggaagaaaatgtgcttaaggttgaacgttagaatcagattatacaaaagagaaaaaaagatgattttggaagcattcagtttacctcatatattacttttgttcagggccttatctaaggtacctggagaggttttatatagatggtgacagttgaatttagacttaagggaaaggtgttccgggcagcaagaataacatccaaaggtattattgtgacaaatattgtgtgcttggaaatgttgaaagaaatacaaaagtatataatttatgctaacaacaaatctatatcaaacaaatatgacaaacaactgcatgcccatacatttgacaacttagattaaatggactaatttcttgaaagacataaattgttgaagctcactaaagaagaaataggcaatccaggaatctatttttttaaaaattgagttgtagttagaaacccaccaacaaagaaaactacaaatccagatggcatcactggtaaattctaacaaacatttaaagaagcagtaacaccaattctacacaatctcttcccaaaaacagaagtagagggatcactttccaaccattacatgaggccagcattattttgatatcaaagccaagcaaagacatatgagaaaagaaagctgtagaccaatatctctcatgaacatagacataaaaatcctcaagaaaatattggcaagtcaaatctagcaatatatgaaaaggataatacactacaatcaagtgaggcttatccttagaatacgggctggtttgacattttaaaatcaatgtaatttgccatatcaacagagtaaagaagaaaaactgtattataatctcagtaaatcctgaaaattatttgataagtttcaatattcattcctggaaaaatagtctcagaaaattaggaataaaagggaacttccttagcatgataaagacatttacaaaatcttgatccattatgtttagtggtgaaagactgaatacttttccccaaagttatgtaacacaaagatgttatttgttaccatatttgatggtatgaaaaggttcaatattgtattggaagtcctagccaatgttataagacaagcaaaataaatgaagggcatacagattggaaaggaagaaataaaactccctatattcatagatgacatggttttatacttagaaaaccctaataaatctacaaaaatttactagaactaaaaggtgaatttcgtaggatcataggacaaagcaaatatctaaaaataaattatgtttttatatactatcaatgaacaactagaaataaaaattaaacaaaaacagtataatttacaatagcatcaaatgacatgaagtgcttaggtatgcataggtccaacaaaaatgtgcaggctttgtatgtggaaaattacaaaacactgttgacagaaatcagatacctaaataaatggaatggtatattgtgttcatggatattgttaagatatcagttttctccaaatcaatccatagattgaaaatattctcaaggagaacacacaatttttcttctaaaatttatatggaaaaacaaatggcctagaatagccaaaacaattttgagaaagaagtacaaagttggacaattcatagtacttgatgttaagacttaaaataaagctacaatagttaaaatagtgtggtatgtgtgaaatacagactaatagatcattgtaacataatagagagtctagaaatacacccacatatttaatttttgacaaagttgctaaggcaatctcaacagaaaggtaagtcttttcaacaaatgttgctaaaatataaagcaattggacatccatatgcaaaaaaaaatataaacaaaccaacataacaaacctctacctgcacttcctaccttgcacaaaatttaactcccaatggatcacagacctaaatgtaaaacctaacattatcaaacttctggaacagaagcaggcaaactttttctgcaaagagctagagagtaaatattttagtctttatgggctacatatatggtctctgtcacatattcttttttaaacaaccctctaaaaatgtaaaaaccattcttagcatgtaggcagcacaaaaagaggcctataggccatatttagccatgggaagtactttgtcatcccttgttttagatgaagaagcataagagaaaactctgtgatcagatgttaggcaaaaacttgttagaataccaaaaagacaattcataaaagaaaaattggatatattggactttattaaaattaactgtattttcatatcatatatctgacaaaggacttataagcagaatatataatgaactctcaaaactcaataagaaaacaaacaaccaacttttaaaatatagttggaaaaatgagcaaacaatttgagtagataccttaccaaagaagacacccaaatgtctaataagcacatgtaaagatgctcagtataatttatcatctgggaaatgcaagttaaaaccacaatgggataccacttcataaatattagaattggccttttttcaaaaaggataactgacaataagtgctgctaaggatgcagagtaactcgaactctcatacattgctagttaatacacagaatggtgcagccactttgaaaaacagtttgacaatttcttatatagttaaacattgtctttgcacatgacacagcaattctactcccaagaaaaatgtgaagcttcacatagaaacccgtagaacagtgttcatagcagcttaattcataatcaccaataattgtaaacaccccaaatgtgcctcaaattgcaaaaagattaacaaaatgtacatattcatctgatagactaataaccagcagtaaaaagtaactactgatacacataacaacatgggtgaatctcaaatgcattgtattaagtgaaagaagacatattcaaaaggctacatactatatgattgcatttgtatgacattctgggaaagaaaaatctgtaagacataaaataaatcagtggttgccaggtaattgggatgtggggacgagttgactacagcgcacaggggcttttttgggtttatgaaaatgttctatgtcttgattttagtggtggttatatgactacatacctttgtcaaaactcatcaaagtgtacactaaaaagacagaattttagtacatgtaaaaattgtttaaagtgggagtgacagagggacagacagaagatggagagatggacagttaagtttctaatgtcaaagagatgttttactaatgaagggagaagcttgaacatgtttataagccatggccctgagttagtaaaaaggaaaatgttgaagttatctatcttaaaatataggtaacttgaaaatatattttaaacttatgaatatataactgtccacaatgagttacaagtagaaggaatatgtggtttgtaatcttttgtactttcttgtgaagttgatttaagtattgaagtagtgatcagcatatgttaaattataaggctgtaactattaatagattccctatcctttgctcttgatacttatgtgtacttttcttgctgaatgaatgcccagtttttcaagattcttgcttaatatgatatggttcccaaggactagtgactcaggtgttgcttttaatatttaaactgtatttatttcttaaaggtgatgttggaccaaatggacaacctggaccaatgggacctcctgggctgccaggaataggtgttcagggaccaccaggaccaccagggattcctgggccaataggtcaacctggtaagattagagtaaatgtgcattttgtagcactcataatatatacatttgttagctcatcaataaagtgaaacctacaaaacagtcttccagaagcagacttaaaaggcaatctatctatgtgtatgattttataaaagtggataagtacaagccacagcataaaagctactttaatccctgatatttcccttctgagttcatctaaaattgatgtatttccaataatacaattgcagtgtattattgatatgtaattgttgagttagacatggttttggaagcagaggcctagaaacttctagtgctgatcatttcagatctgagtagcggtacagcattcatagacctttgtggaacctcctaacatttcttagcacatgacaactagaattagggttcagcaaaactttctgtaaaagtgtattttaggcattcccattttctttttttttcagtgagttattttccctttttgcccctaaaatagcagtcattttgcaattcatcagcactccaaatctttacttttaatattttatattggatactcaaaaaggtcttttgtcaacacgtaacctaatgggtttgcctctatagataggaaatcatatggttcctctaaatttgtgtgaaagcatattgagtttctggattctgagctgtctggtgatgtgaattctcgttatgttaatctaggtaagtacagtaaaggccaccttggggccatcattatgttattgcaaaataccataataatttatgaaattaaaacaaatatgaaatatttaattgttccttaattcacatgaatacatctgaaggcttaaacacagagttcagatgtgcatacatttatctgaagcaatggctatatgtttcctgaccttaaatggcagtagatattttgttattattctaaaaatttagaaactcaggttaacaatataaaaagcttgtaaatgttattttcattatgtactatttacaattgattatatggcacattatacctttttatggtccctgacatgtcactactgatttaaaactaagaaaacttagagtgttgctttgaaccaggttgttacaaaatagctgctttatcacttatggaaaaaacattctgtccaactaacaaagcagagggatcttcaggaaaaagcacttatttttaggtttgacctgctgttttttttttgttgttgttgttgtttttgttttgttttgttttgagacagagtttcactcttgttgcccaggctggagtgcaatgctgcagtctcagctcactgcaacctcctgggctcaaacgattctcctgcctcagcctccggagtagccaggattacatgcatgcaccaccacgcccggctaatttttgtatttttagtagagacagggtttcaccatgttgaccaggctggtctcgaactcctgacctcaggtgattcgcccgcctcggcctcccagagtgctgggattacaagagtgagccactgcgcccggcccctgctgttttacagaggtggataaaatgaacttatcactcctatggtgttttgtcatttgtttcagttccaaaaagtgcatgagtctttagaagcattttgaattcttaagtcacagctgagtgcgaataaaaaaaggaacaccattaatatgaatctaaacaaaatacaaatatgttaacacgtgtcacgctttttcagatttacctgataccttgtaatgttttattaatctaatgttctctctttctttctccctctgttatatgatatatctgacaaaggacttataaccagatataaatataatatatagataaatatatagatataaatataatatagatatagagatattgatttataaagtataaataggatgggcaggaagaaaagtaataatgctgaattaaacttcatctatttcttttgtaaatatatgtatagccatagaattcaagatattaatatgattcaacaaataaatgaaattaacaggaactagcatgaaaatttattgaattcactcttaatatagaaatgttctcaaatcacagtacttttcattttactatgagatggaccacatttcatatttatacaaggcacagatactcactttctaagtaaattttacttacatcaccaaaatagaatattatcttagttcatttaaaaaacatcctgatttatgtccataaatctcaataataaggtaatcggaaagattcttatatcttgataaacctacttatgttgcatggctgaaactctatcaatgtttttgtaataagcttatttaatatacttgtatttcattttgcgataggaaaaatgcaaaatattctatactgttatctctctactgtagaatgtttacattatgctttttaggctttcctttgaactccagttttctattatttaattaagcttttactatttacctttctcttttctaaaccaggctatacagtttaacacggttataagataaggtcccattgaatatcagtttcccattccatagcagggaaataaaagaaaaattgccaaaggactagaaacaaaatatttttcatctcatgacctgctaacccaggcagaaatggaggttgttgattcttgttattttctttggccattacctgtacaattactgtcttactgaatttttttagagatcagttaaatatactctatttcatgttcacagatcatatcataaccagaaccaaacgtgttatagtgtgtgtccagtcttaggacaaagcatatggctaaatcagctaaagaggaaaaaaaaattcatcaccactaatgtgaatcaaaacaaacaaaacaacaacagcaaaaccctaggaattgtttatgaattattcatgtcattttcatagatgaaggagaaaatagttttctaacacttcaggaggctacaaaacccttgggtagggggagggtgtgtgtatgtgtgtgtatggaaagttctcacgaataatacatgtttttgaaattttcctttttttataaactggttccattcggctgccaataaatttagaacatcagtatatccctatatcacatctgtagacatatccatacaattcttgttattgtggggaaatttagcggaactttgggatttatattgacttcttcatcctggatcttaccaggatgtgtattcctgacagtattcatggaaaaaatctatgctatgggaggaagtatagtataatgtctgttattactactactaataataacgatgaagaaagaaatccttgcctagtgcatgcaagttgtttctccataatcatatgctaataatgattgatttatctatacccaacctgttgtagtataaaattaaattaatttttaaatttgaactaaactttaggagcttaaattccaaaaagattatttaaatcattaagtcagagataaacaattgaaaagctgacctttaccaaaaggtaatacttttgtgaatgtaaatattttattatgtcattattggcaaatacatttcatttatagaataagctatatgaacatctaagcaaatgcctaaaataagttttttcactcatttctaatatatgatagcagtgaatcgaggtctaataacttctatttgtagagttttatgttctaatttttaaatgcttagtttttttttccctaacctaatgaaactttttgcaacttacttctgcttgggtggcccaacttgctgctgaactgtaattccctgcctcttgaacatcaggtgtaccaggtactgtagttcttcctcaaaagccatatcttaaagtaaagctttaaacatggaaaacaaacatttctccagatttaagtctttggtttatttcccttattttatagaactgctctcttggagcacgtttcaaaagataaattatttatattgaaaacccaactattaaaaatctttgtgagctataatataacaatagatagtgatccatataaagctataatcatgttcactgttaggcatcatatcatctttcacaaatatgatataaaaatctctctctcctttttatagtcttttactgtaaaatggcagcattggaactatcgctactttgccaactgagtgtaattctctaatcttcaaagtggattttgtcagtttagggccatgctgaaatatgacataaaacagatcttaaaaccctagcatcttactctctacaaaaataatcaccactgagtcttcaacaataaatttagatcttattgttgaaaggagacttggaatgatcatctggctcaacccctagtttccaattggttatggcataatccccatttagcagatgaggatcaacattaagtgactcacgtaagtcgcacagctggtaggctttggagtgggaagttacatagtatttttagtgtaattcttttcccataaacatactcttttttaaccaccttgcttttgggggaaaatcagccttacagaaacttactaaggttaaatattttttgctgtgtcattttttttctgtaaaatcttggttggagaaacaaaagatgacaaaaaatactaatagtaacatattattaatgtattattaaaacaatgtgcaaaacaaaggtaaaatacaatttaagaagtccacttaagtgacttattcagtaatcaataattttgggagctcatagagatgtgtactaataatttataatacattagaacaatgcaaatgtaagtgtgttcaatagaccagtgtcaaataatctatcagtctgcaataggattaatacaaatgttgagaataagcatttagaaacttttatagcaatttgatagtgtaattgtatctgttgaatataataaccaaaaaggtaggcttttattttgcatctttggctttttattcagttttagtaattttcattgtattttataaaaaatattagtctgtgattaactaggaattaagaaaagattggccttttgccagaaataatttgagaagcactgtcttagagcaatctgcttgaaaatcctaaagcttgattgttcagttattttgtgtgcatgatgtcaaaagtatctctaactcactcttaggtctgttatctacagggttctatcacttgtttactagaaatataaccagatacatcttttaaaactgcttcagtacttattaatattgatattgtattaactaggtttacatggaataccaggagagaagggggatccaggacctcctggacttgatgttccaggacccccaggtgaaagaggcagtccagggatccccggagcacctggtcctataggacctccaggatcaccagggcttccaggaaaagcaggtgcctctggatttccaggtaatttgtttaaagttttctctgatttggattaaggaaattaaaactaatacgactctggtagataattcccatgttacacttttctagattgacgtgatcccttaaggatgagcattaaatatctatgactgcaggaagctcactttgctattttcactgcacatttttctctgtgagagttccagttatatattactgtataacaaacaaccccaaaacttaatgattttaaccaaccttttaattttgctgaagattttgcagctctagaattaagggatgacttgactggttcatttatctctaacccacgttgccccagctggagtgtttgggactgaaaggtctacttctaagatggcacttctctgacatctgggtgttcattagctcacatgtcatctcatcgtccatggtacctcttcgcatggcttaggctcctcacattatggtagtataaggctggttgctccccttccatggcagctggcttccaacagagagaatcccacaagagaaaagtgagtgtttcaggaactacaggtagaagcggcaagatttcttttctttcgctctctctctccctttttttctttctttttccctttctttctctttctttctcttttctttctttcttttctttctttctctcttctctctttctttctttccttttcttctttctttctttcctctctttctttctctctctccttccttccttctttttttttttttgagacagggtctcactctgtcacccagactggagtgcagtgggacatgatcacagcccactgcagcctcaaacccctgggctcaagccatcttcctgcctcagcctcctcccaagtagctgggactacaagcacataccaccacacacagctattttttttttctttttttctttgtagtgatggagtctcactatgttgcccaggctgctctcaaattcctgtcctcgagcaatcctcccacctcaacctcccaaagtgctaggattataggcatgagccactgtgactggcctgtaagacttcttttgatctaggcttgggagtcacacaatgtcatttagtcaagtgtgaggtacagaatcaaccctagttccaggtgagggttttatagtagattgtacatactgggacatatggttcactggggggccatctttagagattagctaccagactgagtctccttattcatgggtatcagcagtagtgggcactatggtcaaaaagtctaaaacttaacagtgccttacgtccaaccctcaatagttttctggttgacatcttaaaacttactttttatgttccctaagtcaaagaaaggcaaacattacttattgatattcttcaaaggtaccaaaggtgaaatgggtatgatgggacctccaggcccaccaggacctttgggaattcctggcaggagtggtgtacctggtcttaaaggtaataatcaaggtttgctgccagacgtatgtgagagggaaaattaaatatagctttatgtcagtacagaatatttttgttgactgttttaaaatgagcaatggttacttgtgtttctatgtaacatggcatttaaataggtcttgttttcaatttggttacgtgcttagtttggataccatgatacatggtaaatgcttagctcaaaataacaaaatataaggattaagcattaatttttttgtttgtcttttgagacggagtctcgctctgttgcccaggctggagtgcaatggtgcgatctcagctcactccaaattccatctcctgggttcacactattctcctgcctcagcctcccaagtagctgggagtacaggcgcctgccaccacgcccggctaatatttttttgtatttttaatagagaaggattttcaccatgttagcaaggatggtctcgatctcctgacctcgtgatctgcccacctcagcctcccaaagtgctgggattacaggcttgagccaccgtgcccgtctggattaagcattaatttttttatagtcggcctctatcgttgtcaaggaattccagatggagggattgttatctgagtataaaaatgtgtatgcactcaagtaattcatagagtacatccaaggtgcataaatgttttgagtggccagtggcctactcaactatgaaacatatcaataatctttatatgcattaatctttgatggataaaattgatatattgtgttttcacacacattgattttaggtgatgatggcttgcagggtcagccaggacttcctggccctacaggagaaaaaggtagtaaaggagagcctggccttccaggccctcctggaccaatggatccaaatcttctgggctcaaaaggagagaagggggaacctggcttaccaggtgagtgaatgaatttatttatgaatatttttcctgatatatctgaagtttaatttttaaatagcatgaaaagtgacttataatacagaattcaccaacaaaggcacttaaatgcatcaaattttggtaacaaatattaattttcacttcattcatactgtttcaccagtcaacttttgtttgagtattttctttatagtttacctatcacgagctttacctaaccactagtgaggttttaaaatagacttaggcagtcaactactagctttctaaaaagtaatacaggaaaaggatatatagccacaattacttgaaaaacaaatttcagtgtttaggaaatttgctagtcctttcatttttttctccttgataccagataaggacgaatggtacattgctgtactgcagtgttttgatatccatatcatacttggctttcaaatacagttcaccgttattctactttggcagaataaacaagtattggactatgaacagccaagttcagcccgaggggaagtcactgaaagtagatctagggaacaattgtgtccatatagttattttattagaaacaaatacagcgtaaaatattacgtggggttttcaataaaaaaaaaaccttttttatagaagtataacatgttcataacaaaacatcataaaatatggataagcataaatcattatataaagcacttggcacccaatctatatagaatagcctttcaagcaatatggaatgttaaaactagctatatctgtgtatctgcagcttatagtaaagtttgtggctctttgtacgttctatccatcaatattgtcagttcatgtgtatgtgtatgtgtatgtgagtgtacacagatgttaacagtttccctatgagcaggatttggtgggatttttcctcaaaaaagaattaaaaatattaatgcagtgttgtatatagtcaagaaagaggcagggtcacctaattttttatggaatgactttcttggcttaccccttgcaaggcttcttttctgtttcaattatgcttcctgtataataggggcagtaaactatacttgacctctactataggcttattaaatatagtcagaatctaagagataacctagagattatctgtccttattccttatttcttcatttccattgtaagaaaatgaggcccaaaataggaaagtgatttcactactgagtgctctgaatttcttgatggtaggtaactaaaaagtgaaggattttcgtgtgagtccagtgctaatagctcatactatatcagaatatcaccagttcctctaattcacttatagtttaacacttgagtagcttgctttgccaaagttatttcatggatgaataatatcatcctaacttgcctcttctactcattcttggaaggtatacctggagtttcagggccaaaaggttatcagggtttgcctggagacccagggcaacctggactgagtggacaacctggattaccaggaccaccaggtaagtgtgataggccatttgtagcaattgcttagctgacactgaattctggataaataattatgtgtttgtcatgtttgaagatgctgtggatttgatcatggtaataagcttgggtagctactgaaatatggagctcactttcggcaaaaatattgccctttggctctagttttagcagtccagattttataggatattttgccttgattattcagtttcttctttttgtggcagcagggtatacacagaatcagaaatgtgatccaaataaggtgttgtgttttgttacatacattgcaaaatatataaatgagacaattatctcatgaaggcctgaagaattcatcttgtcctgcttttttttctttctgcctttagacaagtcagtcattaaaccatgtaaaacagatggctattgattctatttttttaaatttctaggcatgaaaatttcacaaattctcttggtagtcagttacagcattaatcactcttagagtcgacatttttttaaatcctactaaaactctttcttgtttcttcttcagccactttcttttagtttgtttcctaaggaaataaagagcagcagtccccattcttacaaagtcccttaagttcagttatttgcgctagactccatactacatggccttgatatagttgggaagagaaactcccttcctatctctccctcacatcttctgcattctcttttccaagttagaagtcattgtaaaggaaaaaaataaaataaaaaaagtttaaggcaatactgtggtcctaggaaaaaacccagatgacatcacagagctcaagcacctatgtgctaggaaaaatgtacaaacagagcagccatgcctgttcaggtcactgcccagtatctgtccaccacctctaatctctccctggcctaatgtactaaactatatcataacaggttaccaccttttctctttctgatctcatataatcacgctctacatgagaagcccatctctgaatcttttaaaaaacagacttattatattggatttatctgtgaaaatacattaagggtagttgtacacatacagcaaatagcacttcaggtgattggaattgttttagggaaagaaacaaggtgttctggtaactttttaatttttttttaaagttatattaggagacctctattactatggttatattgtaatatgttcccaaggagatgttttatgttgggttctatctgtggaccttaatcatatattcagatttaatccatctaatcccatgtttgcattttaatgactatccattcccatgaaaccagacaaccccaatattgctacattgtcttaattttaccaatttgacctttctaggtcccaaaggtaaccctggtctccctggacagccaggtcttataggacctcctggacttaaaggaaccatcggtgatatgggttttccaggtgagtgatgaaaatcttccaaatatttagtcccattaatgaaaggtggttcaatatctctttttttgtcagaaaagaggctggtgttgatagaatcagactgaaacgatatctgaggtaatcagtgggtagtgttctcttgttacacaaatatttaaaatgggaattaagggacaaaattgtagaaaccttaaaagttataattcacaaacatcttttctccagctatacccccttttatttaaacttcctttaaaagtaggcttttatataattgtgtttgtgaggctcattattatctaactcagagtttgcggagctttttaaaaatctttttgctttgtcatatgcatcttagataatccacaagtaaagcatattttgtaaaatattatatatcacatattttcaacagggcctcagggtgtggaagggcctcctggaccttctggagttcctggacaacctggctccccaggattacctggacagaaaggcgacaaaggtgatcctggtatttcaagcattggtcttccaggtcttcctggtccaaaggtaatctttggcatatagttttaggcacatacttgagcagatatgaaattttttaatactatgctcattcctaagttttcattaaacaaactatagaatgacatagtatattctggataagagatttattccttttcttttctcttagatgataagaagatatgttttagggtttgtggccagtccaaaataaaaagggaaaactttctggtttctttgtttttcttctatcttaatttctggatatacttcaataatctcaatgcctagatttttctggtcttgttagtccatccctttttagtgatggagttgttggcctttgtcctaatgttattattaactaatttgaaaagacttataaacaaagtgacagttaatgctaatgtagtagtattcttaactgcgtgtctgagatagtcctctgaatacagttttacaattccctctacttctctcttcaatgtgaaaactttggtggtgtttctcaagtaatcaaatttagaatttgtttcagaatcattggactcaacaggaatttatttgacaattgtttagttccatgtcaaaaagtagtaactccttaatcatgtagtcagaccacagacctaaaaagtattagaaaaggaattttggtactcagttttcatggaaatagtgaaagttcccagtgatataagaatttattgaattgtatgtaaggataatttttcttttaatattatataaaaatactttattttgatcatctaattgatcaatgtcttataaagagataatcaagagaagtttctgtatgttcattccagtttaacaatgtaaagtttcttgaagtgaattttaattttctctgttatatttatattttaccagtgacattgaatatatgattttattaaaaaataatatagacatattaagggtaagagtgaaaatcttcttcatgccccatcctctttttaccattcctttcctcatagaggcccactgtcaatagttgatatataaatttgaattccttgttctatacatttatatatatgcatatagagtttggggttttttctacacattgtgtatatgtagaatcatggtatgcatgctactctgtaccttgctttatcacttacccctttttatttcttttttcaatatatcttagacaattttctttgtcgtcatacattatatctgtggacatatatgtagttatttatactgtatagtttcataaaagtgtaattgttggatcaaaggataagtgcatttaattttttggctttttaaaacacttataataatgtaacatatgaacttgattttaaaatacaaccagtatgaaaagatgtaaaataaaaagtctcctttttacatgtttgcaaaccccaaatccccagttcttcttctccagggtaaccacttttagtagtttctctcatattcttcaagaaaggttttctaaatgcatttatatgcatgcatatatggtatttcatcaattttaatactcattttttacatccaaaatatctaatattggaatgcatcttattatgatggaaagcatattacaattaaaattgtaaatatttttccccaattattgatacatgaaatgatgctggaccttccaaatgtagatgttttctcatattttaattaatatatacaaaattatactatacatctgctctgtacctagctgtcatcacatagtaaatcttgacaaactttctttatcagcctataaatgtatgccttattattttttataattatatagtatttttatgggggttcactataaataatttaacctattatgaatatgaaaattatttctaggttcatgattacaaacatattttgcactgaagattcttatccatattcttacatacatatcttaagaatctttggtaaatatcaccatagaataaattctgagcagttgctagaacccagcatatatgtgcctttttaatatctatatttactgccaaattttccaattaagtaactctacacctttatactttcatgattagtataagtgattttctcctcattctacagatattgggtgttatcaatttaaaaaattttaccaatctaatgggtgaaaagtagtgtatcattattgtttatatttgaattttcctgattacaagtggggtttcagatgtttttaactctttcgtaaattgtctatttatactctttgcctcactgttttacgagaggacttggttatgtatttcatactgatttgtaaaagtacattataaatgtgaagatgcatccactgtctgttatatttgttgcaaatattttctcccagtcagttgtttgtcttatagcatgtttactgtgcatttcgttatgtagatgtttgaaatttttacataggcaaattatgtactcatttatttattcattcacaaaatatctgttgagtatgtatgatttaccaggtactgttttaggtgctggagatacagcctgaacaaaacagacaaacttttactgccttcaaggagcttatatttagtcaaggagtcatacaataaacaaaataaataagtctgtattatgttagaatgtgataaatctcatgatgaaaagtaaagcaagacttgatgataggaatttctggaaattgttatattttgaaataggttactaagggaaagtctctctgataagatagagcagtgaccacactgcagtaagagagtaagtcatacaaaaaccctgaggtgtgagcatacctgacatgtttgagaaacataaatgagtccagtgtgttaaacagaatgagtgagttgaaacaaagtaggagatgagattagattggtaatgggggaaagattatatagtgccttataggtcatcatagtaggggcttttactcctgagtgaatcggggagcaaatggaaagagttaacatgattgtacattaattttaagaactatcacagcacctgttttggaaacagatcatagaggagcaaggatggaaagcagggaaaccagttatggtgatatttaaataatgcaggctaatgatgttgatggcttggatcaagatagtggcaggggaagtgataagaaatgggcagattttgaatatataatatatgtcaagccaggaagatttgtgtatggaatatgagagagaggaatcaagaatgactccagtttttatcctgagcaaatagagtggagttgctatatgctgaaatacaaaaactttgaaaaaagcaggtttagtgagaaagatcaggagcatagttttttattttatttatttatttatttgttttattatactttaagttccagggtacatgtgcacaacgtgcaggtttgttacatatgtatacatgtgccgtattggtttgttgcacccattaactcatcatttacattaggtatttctcctaatgctatccctcccccattcccccaccccatgacagggtgtgtgatgtcccccgccctgtgtccaagtgttctcattgttcaattcccacctatgagtgagaacatgcggtgttcggttttctctccttgcgatagtttcctcagaatgatggtttccagcttcatccatgtccctacaaaggacatgagctcatcttttttatggctgcatagtattccatggtgtatatgtgccacattttctcaatccagtgtatcatggatggacatttgggttggttccaagtctttgctactgtgaatagtgccacaataaatatacatgtgcatgtgtctttatagcagcatgatttataatcctttgggtatatacccagtaatgggatggctgggtctaatggtatttctagttctagatccttgaggaatcaccacactgtcttccacaatggttgaactagtttacactcccaccaacagtgtaaaagcattcctatttatccacatcctctccagcacctgttgtttcctgacttcttaatgatcaccattctaactggtgtgagatggtatctcattgtggttttgatttgcatttctctgatggccagtgatgatgagcattttttcatgtatgtgttggctgcataaatgtcttttgagaagtgtctgttcatatcctttgcccacattttgatggggttgtttgattttttcttgtaaatttgtttaagttctttgtagattctggatattagccctttgtcagatgagtagattgcaaaaattttctcccattctgtgggttgcctgttcactctgatggtagtttcttttgctgtgcagaagctctttagtttaattagatcccatttgtctattttggcttttgttgccattgcttttggtgttttagtcatgaagcccttgcccatgcctatgtcctgaatggtattgcctaagttttcttctagggtttttatggttttatgttcaacatttaagtcttaatccatcttgaattaatttttgtataaggtgtgaggaagggatccagtttcagctttctacttatgactagccagttctcccagcatcatttattaaataggaaatactttctccatttcttgttttggtcaggtttgtcaaagatcagatggttgtagatgtgtggtgttatctctgaggcctctgttctgttccattggtctacatctctgttttggtacgagtaccatgctgttttggttactgtagccttgtagtagagtttgaagtcaggtagcatgatgcctccagctttgttcttttggcttaggattatcttgacaatgtgggctcttttttggttccatgtgaactttaaaatagttttttccaattctgtgaagaaagtcattggtagcttgatggggatggcattgaatctataaattaccttgggcagaatggccattttcacgatattgattcttcctatccatgagcatggaatgttcttctatttgtttgtgtcctctttcatttcgttgagcagtggtttgtagttctccttgaagaagtccttcacatcccttataagttgtattcctaggtattttattctttttgaagcaattgtgaatgggagttcactcattatttggctctctgcttgtctgttattggtgtataagaatgcttatgatacatctctagaactcttcaccccaatcaacagaatatacattcctctcagcaccacattgcacttattccaaaattgaacacatagttggaagtaaagcactcctcagcaaatgtaaaagaacagaaatcataacaaactgtctctcacaccacagtgcaatcaaattagaatttaggattaagaaactcactcaaaaccgcatgactacatggaaactgaacaacctgctcctaaatgactactgggtacataatgaaattaaggcagaaataaagattttctttgaaatcaatgaaaagaaagacaacattccagaatctctgggacacatttaaagcagtgtgtagagggaaatttatagcactaaatgcccacaagagaaagcaagaaagatctaaaatcgacaccctaacatcaattaaaagaaccagagaagcaagagcaaacaaattcaaaagctagcagaaggcaggaaataactaagatcagagcagaactgaagaaaatagagacacaaaaaacccttcaaaacatcaatgaatccaggagctggctttttgaaaacatcaacaacattgatagaccgctagcaagactagtaaagaagaaaagagagaagaatcaaatcgacaaaataaaaaatgataaaaggaatatcatcaccgatcccacagaaatacaaactaccatcagagaatactataaacacctctatgcaaataaactagaaaatctaggaagaaatggataaattcctcgacacatagactccccccaagactaaaccaggaagaagttgaatctctgaataggccaataacaggctctgaaattgaggcaataattaatagcctaccacccaaaagaagtccaggaccagatggattcacagccgaattctaccagagatacaaagaggagctggtaccattccttctgaaactattccaatccatagaaaaagagggaatcctccctaactcattttatgaggccggcatcatcctgatatcaaagcctggcagagacacaacaaaaaaaagagaattttagaccaatatccctgatgaacatcgatgcaaaaatcctcaataaaatactggcaaactgaatccagcagcagatcaaaaagcttatccaccaagatcaagttggcttcatccctgggatgcaaggctggttcaacatatgcaaataaataaacgtaatccatcacataaacaaaaccaaagacaaaaaccacatgattatctcaatagatggagaaaacaccttcgacaaaattcaacagcccttcatgctaaaaactcaataaactaggtattgatggaacgtatctcaaaataataagagctatttatgacaaacccacagccagtatcatactgaatgggcaaaaactggaagcattccctttgaaaactggcacaagacaggaatgccctctctcactactcctgttcaacatagtgttggaagttctggccagggcaatcaggcaggcgaaagaaataaagggtattcagttaggaaaagaggaagtcaaattgtccctgtttgcagatgacatgattgtatatttagaaaaccccaccgtctcagccccaaatctccttaagctgataagtaacttcagcaaagtctcaggagcatagttttttgattgtcaatattttgttgctgaaataggaaattcatcaattgagggggagagagaggaagaggtaaggaaggcttgaggcctgtcacatagattttaggattttttggaaaaaaagtcttctacttatgaagacttctatatcctgagattataaaaatagatttatatatttcttacaggattttcatggtttttttctgtacatttgcattttaatgcacctgagtatttctgtatgttgtatgaggtgagaaactaactttattttttttcccaaataaatatccagttgactgagcctcatttgttacaaactcaattctttattcactgatataaaattgtatttaaattttttttccaaatttgttcatgaatttttttttctggaatgagtgaattttaacattttactaatggaatcaaaattaccataataaattgtctctacatttttaatgggtgatagcagaaaaatatgttttaattggtaaatgtccaaagtatattcaactctacaagcaagaggttagcttttagttcttctgtgtgacctacaagtatatttcagtaagcaaattttacactaaatttagaaacttaacaaagatgatattgtggaaataatgtaaagtagtctgttgtttctttcagatggcattattataccttaaaatagtgacatgttgaaaaaataaaagtttttttagctcagttctattaggtacaggtgatctttgcttttgcacaaatttcagttatcattacttaacaccgatccacaacaacattgtttaaattttagttgctatgatatattaactcttccatttataaatcatcatctaaataagagatgtgcattacaatcagtggacagtaatttcacttctttcaaattctgtcactaattagtaaccatgcatctgttcagttcctgcactgacagcaaagcatttagttgtgtcacctccttgtctcccagtgataaagcaatgtgacattttacaaaaatggataatcaaaagagaaaattagccaacaaagaagaaagtgcaacaaaaaaaaaaaaaaaggaaagtgatagcactggaagtaaggtttgaatctaaagtaaatggggttatagaattaatagccaaccatagaattgtagacactgccaccatttgagagactctagatatgcagctaaggaacttagtgaaggcaaacttatcaacattaatgaggaaaggagcactgatgaaaaggatgaagatgtcacagaggaagtgttgccatcacaaatttcacattaaaggaactcttggagatattttacaagtttgaaagtataaaggttaacatgctggaagctgatctcagtttagaaacagtgagacaatttctgtgccaaggcatagaaaagatgtgtgctctgtattgtaagttatacgagaagaagggagacactgttcaaattactcttggtaacttttttacaatgaaataaatcactttatttttcaatgtttctaatgtttaaattagcatttaccaaataaatattggatttactattttttatttctttatacatgtgtatctgacattaaaacatattttaatgttttgataacatttttaaaggtcatagaataattacattttcccccattgattattaagatcactttacatgattttggtttgcagtttcatttttccagttccacactaccacgtgaaacaaagagtacccatattataaaggaagagaagaagaacagttttaggaaatataatggtatgattgagggaaaacaagcataagacaaatttctgtaattactgagttgttaagaaataggaatagtggtaaaatatcagataggtagtttgttttatggatgtcactgtttatgaaacagcagctctgttagtcaaaaagcatgattaataaagtatactgaaaaccccagacaaggagtcagtaggcagaaatttgagtcctgggtttgtgtacatgaccttgataagtcacttaattcttcagtgtcttcagtaccttgtccataaaaagtgggagaaaaaaaatcctactttttgtagttattgtgaggtttcaatgagattaaaacatgcttcataaaaaagaaaaaaaaggaaaaggaatgaaacactttgtaaattataaagcattctatacatagtatttctttttatctaaaatgaaagggctggagtagagggtgtctaagatatctggaattctcaaatataatgactctatggaactatatgaatctgtaatgctcttttaatatagtgtaattgttctaaccttcataactcctttttaaaatctaatcatactacagattcatccctttcataatcccagatggcttttatgctgaaattgacaagtgtatcctaaaattcatatggaagtgcaaggaacccagaatagtcaaagaaatcttgagaagaacagatttggaggactcactcttctggatttcaaaacttactacaactatgataccagcactgggtagacatagagactgatggaatagatagagtccagaaatacccatacatttttggtcaactgattttcaacgtaggtaccaaaacaatttaaagggagttaaggatagtcttttcaacaaatgatgctggaacatggatgcagctggaggctactatctatcctaagcaaattaatgcagaagcagaaaaccaaatagcacatgttctcacttaaagtttggaggtaagtattgggtatacacagatgcaaagatgggacaataaattctgggtattcccaaaaggggtaaggagtgggggaagtgttgacaaacctatggagtactatgttcactacttgggcaatgggaacattagaagcccaaacatcaacatcacataatatacccatgtaacacacctgcatacataacccctggatctaaaataaaaaacaaaacaaaaatcaaatcatgctgggaaaagaggatacctgtctgcaaaagaatgaatctggacccctatctcatactgtatacaaatattaactccaactggattactgacctaaatataagaactaaaccataaacatattaggataaaagatgactaaattcttgtgaccttgcattaggtaatggtttcttagctatgacactaaaagcacaaacaactaaaggaaaaataaattgggctatattaaaattcattaggtaatggtttcttagctatgacactaaaagcacaaacaactaaagaaaaaataaatggggctttattaaaatttaatgtgttttctgttgcaaatgataccatcaagaaagtgaaaagacagctcacgagatgaaagaaaatatttgcaaatcatatatgagataaaggatttgtatacagaatatataaagaattcttataattcaacggaaagcaaataactcagtttttaaaagtgcacaaagtgaattggacctaacaaacatatacaaaatattctatccaagaaaaatgcagaatatacatttttgcaactgcacatggaacattctccagaatagacaatatattagagcacaaagtaagtcttcatacacttaaaaagattaaaaccacacagcatatattttttaatcatgatggagtgaaattagaaatcaatggcagaaagtaaactggaaaatctactaatgcatgtaaattaaacaagacgctcttaaccaatgaggcaaagaagaaatcacgagggtagttagaaaatgtaatgtctttttttttttttttttttttttgacagagtcttattctgttacccaggttggagtgcagtggcgtgattgtggctcactgcaacctctgccttccaggctcaagcaattctcatgcctcagcctcctgagtagctgggattacagatacgcaccaccatgcttagctaattttttgtagagatggggttttgccatgttggacagttggtcttgaactcctgacctcaagcaatccaccctccttggcctcccgaagtgctgggattacaggcatgagccaccatgtctggcagaaaatataatgagacaaatgaaaatgaaaccacaacataccaaaacgtacaggatgtagtgaaagcaatgctaaatgggaaattaatagctgtaaatacttacattagagaagaaacatctcaaatcaaaaacctaactttacatcttaaagaactagaaaaagaaaaactaaatccaaaactagcagaaagaaagaaataataaagattagagcagagataaataaaatacagaactaaaaaaatcatagatgaagtcaacaaaactaaaagttgtttcttcaaaaagataacaaaatagaaaaagttttagctagcttgactacaagaaaaagagagaagactcaactaaaatcagaaataaaagaggagacattactaccaatcttacagaactaaaaatatatgagactgctatgaacaggtgtttgctaacaaattagataacctggatgaaatgggcaaattcctagaaagacacaatctaccaagactgaatcatagaagtagattatatgaatagacctaaagtgagtaagaagattgactcagtaatcaaaaaccttccaataaagaaaagctcaggaccagatggctacactggtgaattctaccaatctttttttttttttttgagacagggtctcgctatgttgcccatgctggatggagtgcagtggtgcagttacggctcactgcagccttgtccttgtgggctcaagtgatcttcagcctcccaaatattttccaaacaattaaagaaggattaacagcatttgttttcaaggtcttccaaaaaaattgaagaggagggaacacttccaaactcattatattatacctggattaccctgataccaaatccagacaaagacactacaataaaagaaagctacagaccaaaatcccttatgaatattgatgcaaaaaatccttaacaaaatactagcatactgaattcaacagcatattaaaaggattatatgccatggtcaagtgagattttttcctgggatgcaaggatagttcagcatacaaaaatcattagtgtaatacaccatcacactaacagaatgaaggagaaatcccacatgatcacttaattaatgcaaaaaaaagcatttgacaaaattcaacactgtttcatgattaaaaaaacacaccacaagctaggaatagaagcgaactatctacttattataaaggtcatatatgaaaaaacccacagctaacaatggtaaaagtctgaatgcttttcctctaagaccaagaagaagttaaggattcttaattttactacttcctttcaacatagtactggaattcctagccagaccaattaggcaagaaaaagaaataaaagtcatcttaattggaatggaagaagtaaaattatctttgttcagagatgatataatgctatgtagaaaactctacaaagataccatatatgcggaaaataggtagaactaataaacaaattcagcaaagattcaggataaaaaatcaacacacagcagtcagttttgaatgttttgatgcatcaacaatgaacattccaaaaaggaaattaagaaaattaaatttacagttgcatcaaaaagaataaaatacttaagaataaacctaaccaagaaggtggaagacttgtgctctgaagactacaaaatattgctaaaaggaattaaagaagacagaaataaatggaagatttaatactgttaaaatgtccatactacccaaagcaatacacagattcaatgcaacgcctatcaaaactccaatggcatttttttttccagaaacgaaaaacttagtctaattcacaaggaaatctcaagggaccccaactagccaaaacaattctaaaaaagaaccaggttggaggactcataataattttttattagaaaacatattacaaagttatagtaatcaaagcggtgtggtgctgacataaagacagcaaatagaccaatgtaatagatagaccagagataaaatctctggtctgtagttgaatgatctttgacaagggtgctcaatggggaaaggcgttcaacaaatgcatgctgggtaaaatgaatgtccatatgcagaagaatggagttgaaccattttcttacatcatatataaaattaattcaaaaaagaatgaagacctaaatgtaagacctaaaactataaaactcttagaagaaaacatgggacaacatgcctcatgacattagatttttttcaatgatttcttggatatgacaccgaaatcacaggcaacaaaagaaaaaatagattaattggacaacatcaaaatgttaagcttttgtgcatccaagaacactactaatagagtgaaaaggcaactcatgggatggaagaaaatatttgtaaattgtatatctggtaaaagattaatttccagaattttaaaaagaactcctacaagtcaataacaaaagccatcaaacaacccaattcagaaataagcaaatgacttgaatagacctttcttcaaagatgatatacaaatggcaaattagtacatgaaaagatggtcaacatcactaatcattagggaaatgcagtcaattctacagtgagataacacttcatacccattaagaaggctattatataaaaaacagtaaataacaagtgttggtgaggatgtggagaagttggaactctcctgtattgctagtaggaatgtaaaattgtgcagccactatggaaaacattatggcagttcttcaaaagtaaacacagaattatcatatgatctagcaatttcacttctggagacacatctaacataattgaaaacaaaaatgggacctcaaagagatgtttttgtagccatgcttctagcaacattattcacaagtcacaaggtggaagcatcccaaatgtccattgatagaggaatgtgtaataaaatgtggtatgcacacacaatagatattttttgaccttaaaatggaataatattctgatacatactacaatatggattaactttgaagccgttatgctaagtgaaataagccagttataaaaagacaaatattacatgaccccagttacataaggtacctagaacagtcaatttcatagagacagaaggtagaatggtaattgctcagggttgggggaggggaaaataaggagatattggccaaagggtacaaacatttagttagttataagatgaataaactctagggatcaaatgtacagcatgggcactatagtttaaaatattgtgttgtatacttgaaatttgttgagagtagatcttaattgctttcaccacacactgaaaaaaaaattgtaactcggtgaagtgctagatgtgttaactaatttcattgtggatatgagtataaggtttccgtttgggttgataaaaaaaattctggagatatatggtggtgatggttgcaaaaagtgtgaatgttgtttatgccacaggactatacccttaaaaataattaaaatggtaagatttatgttttgtatattttgatactctaaaaagccacataaaatgaaaatattaattagcttgatttaatcatttcacaatgtatacatgtatcataacatcacatcatactctataaatgtatatagtttttatcagttaaaaataaaatatttttaagtgaaaaaatgaacaaaggaattgaatagctatttctctaagaaagatgtacaaatggccagtatgtacatgaaaaggtgtttaacctcattagtcattatgaaaatgcaaatcaaaaccacattgagataccacttcacacttacttgagtaggcataataaagagagaaaataacaaatgttggcaaggatgtgaagaaattagaacccttttgcattgccagtgggaatgtaaaatgatgcagctgctgtgaaaaaatatttgacagtgcctcaaaaagttaaataaagagttatcatatggctcagcaattccactcctaggtattttcccaagagaaatgaagctgtatttctgcacagaaacttgtacttgaatactcacagcagccaaaagtgaagaaaacccaaatcacaagaatggctaaacaaaatgtgctatcccagagaaaattgaggagagtgaggatcatcatggtggacgggagacaggactggattacagctccaactcggacagacagagcagcatacagaggtacgcattgtgaatttagttccagatcaactgcaacaacaaaccagtaatcacaagaggatgcacagaccctctgaaggaagtggacttctcttgcaggacccaggagacaccccaaatactgtgagtgccccaaatatagaagtggaaagtggagatccttctctcccaaatacacaccgccactggagaaactggaggtctgtttgtgggagaagtttctgaccttacctggagctgagtccatttagagagccaagtgaaatacaggggtagaggaagcagcaggaaaggccctgggggcttgctgggtcaccaagcaggccattcctgcctggcaccacagggatccatcgggagggcagccagaggagtggaggaaagcaccacagggagaaggaagcctccagctgaactttgtaacaatttgaaccaggcgagaagcctcctggccagaactcgggggagggcatgaatccagtgtgcagactccacagatgggggaagaaccaagcccttttcttttgcagcttggtggcaggtagcctgcggcaagttctcaagccctgctcacccaccacctggaaacagacttggggctgttaataggggcacagtgggagtaagatcggccctttgatttgtgtgggagttgggtgaggcctgtgactgctggttttcccccacttctctgacaatctgcatgactcagcagaggcacccataatcctcctaggtacacaaccccattgatctgggaacctcacctccatcccccacagcagccacaataagacctgcccaaggagggtctgagctcagaggtccctagccctgcccccacctgatgagcctttcctatccaccctagtagctgaaaacaaagggcatataatcttgagatttctagggccccacctaccactggttcctctccatactaccacagctgatgctttctggaaagtgccacctcctggcaggaagccaaccagccccaaaatagagcattaaaccaccaaagataagaaccctcacagagtacatttcaccccctgccacctccactggaagaggtgctcgtacccatggctgagagaccatagacagttcacatcacaggactttgtgcagacaattctcagtagcagctgagagctgggtagactttctgggtggctaaaccaagaagagagacaataatcactgcagtgcccctcacaggaagccacatccataggaaaagggggagagtactacatcaagggaacatcccatgggacaaagggatcagaaaaacagacttcagccctagacctaccctgtgacaaagcctacccaaatgagaaggaaccagaaaaccaactctggtaatatgaaaaaacaaggctctttaacactccccctctccaaaaaaaaaaaaaaaaaaaaagtcacactagttcaccagcaatggatccaaaccaagaagaaatccctgatttacctgaaaaagaattcaggaggttacttattaagctaatcaaggaggcaccagagaaaggtgaagcccaatgtaaggaaatccaaaatatgatacaacaattggatggagaaatattaaaggaaatagatagcataaataaaaacaatcaaaacttcaggaaacaatgaacacacttatagaaatgcaaaatgctctggaaagtctcagcaatagaattgaacaagtagaagaaagaaattcagagctcaaagaataagaaaatataaacaaagcctccaagaagtctaagattatgttaaacaaccaaacctaagaataatcggtgtttctgaggaagaagagaaatctaaaagtttggaaaacatatttggggaataattaaggaaaacttccccagccttgctagagacctagacatccaaatacaagaagcacaaagaacacctgggaaattcatcacaaatcgatcattgcctagggacatcgtcatcaggttatctaaagataagatgaaggaaagaatcttaagagctgtgaggcaaaagcaccaggtaacctataaaggaaaacctgtcagatcaacagcagaattctcagcagaaaccctacaagcttgaagggattggggccctatcttcagcctcctcaaacaaaacaattatcagccaagaattttgtatccagtgaaactaagcatcatatattaaggaaagatacagttgttttcgcacaaacaaatgctgagagaattcgccactaccaagccaccacaacaagaactgaggaaaggagctctaaaacttgaaacaaatcctggaaacacataaaaacagaacctctttaaagcataaatcacataggacctacaaaacaaaactacaagttaaaaggcaaaaataaaaaccccaaaataccaaggtacgcaggcaacaaatagcatgatgaatgcaatggtacctcacatctgaatgctaacattgagtgtaaatggcctaaatgctccacttaaaagatatagaactacagaatggataagaactcaccaaccaatgatctgctgccttcaggagactcacctaacacataaggactcacataaacttaaaggagtggaaaaaagcctttcatgcaaatagacaccaaaagcgagcaagagtagctattgttctatcagacaaaataaactttaaagcaacaacagttaaaagagacaaagagggacattctataatgctaaagggccttgtccaacaggaaaatatcacaatcctaaatatatatgcacctaacactggagttcccaaatttataaaacaattactaatagacctaagaaatgagatagacagcaacacaataatactgaggaacttcaatcctctactgacagcactagacaggtcatcaaaacagaaagtcaacaaagaaacaatagatttaaactataccttggaacaaatggacttaacagatatatacagaacattccatccaacaaccacagaatacacattctattcaaaagcccacgaactttctccaagatagaccatatgataggccataaaagaagcctcaataaatttaagaacattgaaatcatgtcaagcactctcagaccacagtggaataaaactggaaatcaaatccaaaaggaatctgcaaatacatggaatttaaacaacttcctctcgggccgggcatggtggctcacgcctgtaatcccagcactttgagaggccagtttgggcagatcacctgaggtcaggagtttgagactagcctggccaacatggtgaaaccttatgtctactaaaattacaaaaaatagctggggatggtggcaggcacctgtaatcccagctactcaggaggccaaggcaggagaatcacttgaacccgggaggcggaggttgcagtgagccgagattatgccactgcactccagcctgggtgacagaacaagactccgtctccaaacaacaacaacaacaacaaaaaaaaaaaaaaaaaagaaagcaaagaaaagaaacatgctcctaaatgagcattgggtcaaaaatgaaatcaagatgaaaattaaaaaattgtttgaactgaacgataataatgatataacctatcaaagcctttgggatacagcaaaggtggtgcaaagaggaaagttcttagccctaaatgcctacatcaaaaagacgaaaagagcacaaactgacattccaaggtcacacctcaaggaactagagaatcaagaacaaatcaaacccaaacccagcagaagaaaggaagtcaccaagatcagggcagaactaaatgaaattgaaacaaaaaagaattgcaaaagataaatgaaacaaatagctgcttcttcaaaaacataaataaaattggtagaccattaccaagattaagaaaagaagagagaaaatccaaagaacatcattaagaaatgacacaggagatattacaactgacaccactgaaataaaaaagattattcaaggctactatgaacacctttatgtacataaactagaaaacctagaagagatggctaaattcctggaaaaataaaaccctcccatctttttttttttttacaattagtattaaaatgggaagcatatctagctcccagatcttggttacttttttttaaaattattattattatactttaagctttagggtacatgtgcacaatgtgcaggtttgttacatatgtatacatgtgccatgttggtgtgctgcacccattaactcgtcatttagcattaggtatatctcctaatgctctccttcccccctcccccgaccccacaacagtccctgatgtgtgatgttccccttcctgtgtccatgtgttctcactgttcaactcccacccatgaatgagaacatgcggtgtttggttttttgtccttgcgatagtttgctgagaatggtagtctccagcttcatccatgtccctacaaaggacatgaactcatcatttttaatggctgcatagtattccatggtgtatatgtgccacattttcttaatccagtctatcattgttggacatttgagttggttccaagtctttgctattgtgaatagtgccacaataaatatacatgtgcatgtgtctttatagcagcatgatttataatcctttggtatatacccagtaatgggatggctgggtctaatggtatttctagttctagaaccctgaggaattgccacactgacttccacaatggttgaactagtttacagtcccacctacagtgtaaaagtgttcgtatttctccacatcctctccagcacctgttgtttcctgattttttaatgatcgccattctaactggtgtgagatggtatctcattgtggttttgatttgcatttctctgatggccagtgaggataagcattttttcatgtgttttttggctgcataaatgtcttcttttgagaagtgtctgttcatatactttgcccactttttgatggggttgtttgtttttttcttgtaaatttgtttgagttcattgtagattctggatattagccctttgtcagatgagtagattgcaaaaattttctcccattctgtaggttgcctgttcactctgatagtagtttcttttgctgtgcagaagctctgtagtttaattagatcccatttgtcaattttggcttttgttgtcattgcttttggtgttttagacatgaagtccttgcccatgcctgtgtcctgaacagtattgcctaggttttcttctagggtttttatggttttacgtctaacatttaagtctttaatccatcttgaattaatttttgtataacgtgtaaggaaggtatccagtttcagctttctacatatggctagccagttttcccagcaccatttattaaatagggaatcctttccccattgcttgtttttgtcaggtttgtcaaagatcagatagttgtagatatgcggcattatttctgagggctctgttctgttccattgatctatatctctgttttggtaccagtaccatgctgttttggtgactgtagccttgtagtatagtttgaagtcaggtagcgtgatgcctccatctttgttcttttggcttaggactgacttggtgatgcaggctcttttttggttccatatgaactttaaagtagttttttcccattctgtgaagaaagtcattggtagcttgatggggatggcattgaatctataaattaccttgggcagtatggccattttcacaatattgattcttcctacccatgagcatggaatgttcttccatttgtttgtatgctcttttatttcattgagcagtggtttgtagttctccttgaagaggtccttcacatcccttgtaagttggattcctaggtattttattctctttgaagcaattgtgaatgggtcttcactcatgatttggctctctgtttgtctgttattggtgtataagaatgcttgtgatttttgcacatcgattttgtatcctgagactttgctgaagttgcttatcagcttaaggagatttggggctgagacgatggggttttctagatatacaatcctgtcatctgcaaatagggacaatttgacttcctcttgtcctaattgaataccctttattttcttctcctgcctgattgccctggacagaacttccaacactaagttgaataggagtggtgagagagggcatccctgtcttgtgccagttttcaaagggaatgcttccagtttttgcccattaagtatgatattggctgtgagtttgtcatagatagctcttattattttgagatacatcccatcaatacctaatttattgagagtttttagcatgaaggttgttgaattttgtcaaaggccttttctgcatctattgagataatcatgtggtttttgtctttggttctgtttatatgctggattacgtttattgatttgcgaatgttgaaccagccttgcatcccagggatgaagcccacttgatcatggtggataagctttttgatgtgttgctggatttggtttgccagtattttattgaggatttttgcatcaatgttcatcaaggatattggtctaaaattctctttttttgttgtgtctctaccaggctttggtatcaggatgatgctggcctcataaaatgagttagggaggattccctctttttctattgattggaataatttcagaaggaatggtgccagctcctccttgtacctctgaaaaccctcccatcttaaatcaggaagaattagataccctgaacagaccaacaacaagcagcaagcttgaaatggtaattaaaaaattaccaacaaaaaaaagtctaggaccagatgaattcacaacagaattctgccagacattcaaagaagaattggcaccagtacttttgacactattccacaagacagagaaagaaggagccctccctaattcattttaggaggccagcatcagcctaataccgagaccaaaaaagaaaactgcagactgatatccttgattaacatcgatgctaagatccttgacaaaataccagttaactgaatccaacagcgtatcaaaaagataatccaccatgatcaggtgggtttcataccaaggatgcagtgatggtttaacataggtaagtcaacaaatgtgatacaccacataaacagaattaaaaacaaaagtcacacgatcatttctatagatgcagaaaaaaaacattcaacaaaatccagcatcactttacaattaaaactctcagcgaagtcagcatacaagggacatacctcaatgtaataaaagctatctatgacaaacccacagccaacatagtactgaatggggaaaagttgaaagctttccctctgagaactggaacaagacaaggatgcccactctcaccactcctcttcaacatagtactggaagtcctagctagaacaatcagacaagagaaagaaaaaaagaacatccaaatcggtaaagaggaagtcaaactgtcactgtttgctgacaatatgatcgtttacctcaaaaaccctaaatactcctccagaaagctgctagaactgataaaagaattcaacaaagtttctggatacaagattaatgtacacaaatcagtagctcttctttacaccaacagtgaccaagcagagaatcaaatcaagaactcaaccccttttacaatagctgcaaaaaataaaataaaataaaataaaatacttgggaatagacctaaccaaggagacgaaagacctctctacaaggaagactacaaaacactgctgaaagaaatcatagacgacacaaacaaatggaaacacatcccatgctcatggatgggtagaatcaatattgtgaaaatgaccatactgccaaaagcagtctacaaatttgacacaatccccatcaacataccaccgtcattcttcacagaattagaaaagacaattctaaacttcatttggaaccaaaaaagtgcctgcatagccaaagcaagactaaacaaaaagaacaaatctggaggcatcacactacctgagttcaaactatactgttaaggccatagtcaccaaaacagcatggtactggtataaaaataggcacatagaccgatggaacagaatagataacccagaaatgaacccaaatgcttacagccaacggatcttagataaagcaaacaaaaacataaaatggggaaatgacacccttttcaacaaatggtgctcagttaattggctagtcacatgtaggagaatgaaactggattctcatctctcaccttatacaaaaatcaactcaagacggattaaggacttaaatctaagacctgaaactataaaaaatctagaagatatcattggaaaaatccttccagacattggcttaggcagagattttatgaccaagagcccaaacacaaatgcaataaaaacaagataaataattgggacttaattaaactaacgagcttttgcacagcaaaaggagcagtcagcagagtaaacagacaatccacagactgggagaaaatcttcacaatctgtacatctgacgaaggacgaatatccagactctacaacgaactcaaacaaatcagtaagaaaaaaaaacaaaaaacaaagaaacaatcccatctaaaagtaggctaaggacatgaatagacaattctcaaaagaagatatacaaatggccaaaaaacatatgaaaaaaaatgctcaacatcactaatgatcagggaactgcaaatcaaaaccgcaatgcaataccactttactcctgcaataatggccataatcaaaagatcaaaaaataggagatcttggtgtggatgcggtgatcagggaacacttctacactgctggtgggaatgtaaactagtacagctactctcgaaaagagtgtggagattccttaaagaactaaaagtagaactaccatttgatccagcaatcccactactgggtatctactcagaggaaaataagtcattatacaaaaaaaagataattgcacacgcatgtttatagcaacacaatttgcagttgcaaaattatggaaccaacccaaatgcccatcaatcaaagaactgataagctgtggtatatatacatatatacaatggaattctactcggccattaaaaggaataaattaatggcatttgcagcgacccggatgacattggagactattattctaagtgaagtaactcaggaatggaaaaccgaacattgtatgctctccctgatatgtgggagctaagctatgaggacgcaaaggcataagaatgatacaagggactttggggacttgtggggaagggtgggagtggggcaagggataaaagactgcaaatacggcacagtgtatactgcttgggtgatgggtgcaccaaaatctcacaaatcaccactaaagaacttactcatgtaaccaactaccacctgtaccccaataacttatggaaaaattaaaaaaaacaagcaaacaaaaaccaaagtgtgctatcccatacactggaatatcatttgacaattttaaaaaatgatgtactgatacatggtgtaaaatggatgaaccttgaaaacattatgctaagtgaaataagcaaggcacaaaatagccacatatcatatgatttcatttatatgaaatgtccagaataggcaaatctgtacaaagagaaggcagattaggttttgctacggcttggagggagtgagaatgagaaatgactgctaatgtgtacagtttcttttagggggaaatggaaaattttctaaaattagattgtgatgatggttgtacaatcctatgaagatactgaaaacattgaattgtacactttaagtggatgaattgtacggtatataaattatatctcaataaagttattttaaaacaatgcacattatagaaaatctacaaagtttctgctaataacatgtaatgtttttagttgtctttaaattactatctttattttaggatgtttttagttctagaatcctgagatttgatgaacaaatgggtgtgattttccccacaattaactttgggcacattttaagtaattgtatgtgctgtgattactagaactacacatgctgtgctagtatggaatagcatgatttatgaatcatattttttctttaatatttctttagtattttgagccacctgtaggctcattgagctgatgtttggagcaatttgctattatgcctatcttgcatggtaaagggtagtatagagctcattatcttttaagtttagttcatattctttttctctaagttcatcattaccttagacatactactattgaatttcatgtggcagctttggcctgctcaggcagccttgagccattatttatcagtttgttactgttagcttaacatttcactactgggaagagctaaataacatgcaaatttgaaggtcttattgtataattccttttctagataattaaaatgttaatggttgctcaatggatataaagcttcagttatgcaagatgagtaagttttacagatctgttatacaatatggtgcctacagttgacagtacagtattgttcaccttaaaatatgttaagaggatagatttcatgttaagtgctcttaccacaaccccccgacacaagaacatgaagaaatttttggaggtgatggatatgtgtagtactttgattgtgcttatggtatcatgggtatatgcatatatccaaactcataagtatgtatgcattatgtgcagttttatatataaattaataaagctttaaaaaagtatctctgcatgcacttttaaatttccctctgttaatattctgggtctaaaatagaacctatttatggttttgttcatggtctttaatctccaaatacagataaggttgtaaaaacattaacaattatgtgggaaccacaacttccaactgatggtctactcttgtaatattcttcttgcataaagcaagatatgatgtttactctttctcctcaaatattttccttttgttgtctttgtttcccccagtggcaatgcttctctagttttacagtggaatgcaagaacaaaagtgattagcttttttaccaatagatgtcttctgttctgtaaaatggggcaagcctgtaagtttattctgaattttgggttatagtatggaatggaggagaagatgctattactaggacatagtagagattggctatgatccaaataccattacattacaatttgaatcttaacaacaaagaagatatcaaattgactcctttttctacgtgatacaacacagtgaccttgaaagcagttctaatttcaggcttgtctttcagtgttactatagtcattagatagtttcacaatggtaaatgtgacttattaggtatgagatatttcattttcagaattatatcaaagcttgacattagaacagatgtagatatttgcagctgtgtgtccgagtcattcaaatcgcttctacctagaagtgcaaatagatttgaattttcctttctcagagtgatttgtgtccagtttgtagattttctgagcactgtcttctttatctcttcttgctttccttttttgaaattcattgttttcaatgagtttgtgtgtgaataataaaaggctagataaagcttaagctagcaaatttcagtgtttttttcagaagccctaataaaatatttactttatttttaaaaggtacttggtttgaaggagtagggccataagagtgattacagaaacggtattgagggcaagtgctggctgaacttagagactgggcttacagtagtccccccttaccaagggggatacattccaagaccccccgttggatgcctgaacctgtggataatacctaaccttttatatactgtgtggttttttttttccatctggtaacagagacagctactaagtgactcatagacaggtagtgtttatagcatggatatgctggggaaaggagtagttcaggtttcgagagggatggaatgggacaacatgacattttatcatgctacacaaaatggcgtgcaattaaaaacataaattatttatttctggaattttcaatattttcagaacacaggtgactgaaaccatggatagcaaaaccatggataaggaagaatttctgtacttttagaatttaatgtcctttagtatcataaataatccagagtttgccttctgcctttcagatttaccactagcagaatagtggaatttttttcttgttttttattttggtatatacatttaattttttcatgaataacaaaaagaatcatgatagtttattcaaaggtttcccatgtaaacacctaagatgggaccaattcaatccaaaatttaattgtatacctattatgtgcctcaaaatgaactagatatttgatttacaaggttcagaaaaaatgtatatattcccagcccaagattcttaatttttttaaataataggatgtaaggaaaaagagactttagtttaaagagctattaccataatgcagaaacatgagtcaaaaatagatcttactcacctgcaagtgtatgtactaagtgaggaaggaagtattcagtaggtgatgttgaacactagcaccttattgtaaaggtcctgatcttcatgcgcagagcagcaagccctgcagtagagatttagtgttaaggtatatgttgccattgttattgggaaaaacttgttttaattgtgaaagtgggtatgaattcttctaaggctctattggaaaaaaccttaatgcaaatattcattgagcaaaaacggttatacatatgtgaattatctcttacccaaaataaactttcaatgtaattaaggagttaagactgcatatatgaagccattgtagacatgacagagtaagaacctaccctaacctcttggggtaaactctctttgcccaggaatgcttcatggaagaagtaggatttttcttttcttgttaagaggcagggctccctctgtcatccaggctggcctgtagtggcatgatcacggctcaatatagccttgacctcataggctgaagccatcctcccacctcagcctcctgagtagctgggactacaggcatgcaccactacgcccagctgatcttttttattttttgtagagacagagtctccctttgttgcccaggctggtcttaaactcctgggctcaagcaatcctccagccttggcttcccaaagtgctacagccacaacactcagccagaagtgggattttagatgcccactgaagaattgatagacttccttatgttacagtgaaaatcacctttttcagtagaacgtactatagcttttggttgacatgtgtactggaagcaatgaattgcattatggcacagtaggaatgataaacacaggttctgaagtcagactgtttgaatccaaattcggatttcatcacttactagctccatcactataacatgggaataataacagtatctttctaatagggttgttaaggattaatgagaataatacatctacatactgtgagaatagtatgggctatgtagtctgattggctacatagctgattgtagtctggttcaaatcccagttctgccacttacaaaaaccttaggcacttggcttctcaagattcagttttctcatttataaatggagataatgaagcctaactcacagaactgttgtgatgattaaatgaagcaatttacatcaagtacttactggagtgcctgacatataataaaagctctataaataatgttatgttcttatacaatctaagtcgtgtagagacttcagtattatctttttattcgtgttttcagggtgagcctggtctgcctggatacccagggaaccctggtatcaaaggttctgtgggagatcctggtttgcccggattaccaggaacccctggagcaaaaggacaaccaggccttcctggattcccaggtaaaatttcttctcttaaatgcttccttctttccttccttatctactccaaccagtatcacagagcagcttcttatttggcagacttatattttatttcccaatcagatactgactagcaacataatctcaaactatctctttaccttttctttgcccaaatttatttctgtataaaatgagaatgaatattactgactcagcaggacaatatcctgtggacagagagactgtttggtggagcatttttcaatctttgactgctagccacaaatcacttaagaagccttgctatttttgtaggtaataatatatacttccaagcctctgcctgcagctgattatcttagaaaggtatgcccaggcacaccgctggtagcggttggtagaacaatcatacagttccttcaaatggcaaggattgagccattcaagtaagagattagcactatagtcaattatgtagcctgaactagattattatagtacctacttgtttagggttgaatttattttttgcttgttttgaattacacagtggcatggatgaatgaacctttcctttttattgaagtgaagcatacatgtagtaaagtacacttaagactatagatgagtttttacctaagtacatatatgtctttgaattgaccatatgtatcaagatataaaatagtttcttcatcccacgaagtttacccatgcccctacgccccccaaccccgaggtgaccactactatgacttccattaccatcagttaattttgcatgttattgaaattcatataaatgaaatcatacagtgatccttgtatctggcttttttcagtcatcattatgtgtaaaagattcatttattttgttacacgtgtcagtagtttgttctttatcattgctatgcaatattacattgaagaatgtaccacagtcaattacacattcccctgttgatggacttttgggttgtttccagtttgggactattatttttaaaaatgctattaacattcttttacatatcttttgataaacatatacattgatttctcttagacaaaaacttagtagtagaaatactgaatcacagggtaggtgtacattgaactttagtagatgctgccaaacagttttccaacatggtttgtaaattagtttcaacagccatgtatgaaatatccagttctccaattgcccatgtcctcaccatcactgggcagtgtcggtcttaattttatctgttttgatgagtatgtagaagcatctaattgaggtttgaatttacatattcctaatgaataatagtattaatcatctttttattatactattggccatttggatagcatctttttgaagtttcttcttaagtacttttgttcattttttattgaattgtctgtcctttttcaaatagattcagagtagttctttatatactcaagatatgagtcctttgtcagatacatatattgcaaatctattctctgtgcctcagatttgcctttcctaatgctgttgtgtaatgaacaaaagttgttaattttaataaaatccagtgtatcaatctttcctttcatgaatagtgatttttttatccaattcaataaatatttgtctatttgaggttatggaaataatcttctaatttttataacatgtttcatgtttaaactttcatatttggcttatgagctatctcaaataaaaatatttttacagtgtgaggtaggggtcaaggttcattttttttccagcacagttatccaattgctccctacactattttttttttaaagaacctaaacgcatccaataaattacagtcacacctttgtaagaaagccaaatgactgtacatgtggtgggctatttccagactctgtgtactgttccaatggtttattttctattgctgctttaacacaacactgaattactgtaaatttatattaagccttgaaaaatggtgggtaagtactagaaatttgtttcagttttttaaagcttgtcttggctattctaatttttttgcaggggaaatcagtttatcaatttccatttaaagtatctgtagggatttttaagtttgcaataactctctaggtaaggtagaggagaattgatattttgacagtattcaaccttccaatgaaatgaacatgttatctctccatttatgtaggtattgagtttgatttaacaatatgctgcactttttgttttgtaaatcttgaacatattttattaaatttatctctggaaatttgatgctttctggtgacatttaaatcatattgcttttcccagttcatcttccagttgtttcttggaagtatatggaaataattgacctaggaatattgaaataatatatgagaaaattgccaatttcactttttaaaattctgagtttgtataattttttgttttataaaatatcaccttagatatttttatttcttctttttcatttctttataccttttatttctttttcatgcttaattgcaccagttaggacctgtagtgcagtgtttaatagaagtggttatagtcaacatcattatcttttttctaaactcagagggacaatgattgctatttttccattaaatgtaatgttagtgccagggttttggcacatatattttactaaattaaggaaatccctttctagtcatactataatgggaatttttataaagaatggatgcgagttttatcaaattctttttctgaatctacagagatgataattgttttttctcctttactcttgatataatgaattacactgattgatattttatgtaaaaataaccctgtattcttgggataaactccaagatggtcatactgtacacattatctttaagtattgttggactggatttgctgttttttaaaaaattatacatggccatgagagagattggcctacgattttcttttctcatagtgtccttgtcaatgttttagtatagggatttgctggccttatgagctgggaagtattccctccttctctattttttctttaaatgtttcatagaattcaccagttaaggaatctggatctgtagttttctttgtagaaacctttttaaattacagattaaaagtctttaacagttatattactattcagatgatttatttttatgtcagtttaaatacattgtgtttttcaaggaaattgaccatttcatctaaattgtcaaattcattggcagaaagttgttgataatatccttgttttgtccctttaatttctgcagaatgtgtactgaagtctgcattttaataatgttttgatataagtaattttatttctttattttgatcaagcctctgaggcattcattaagctttattaattgttaaaaattaactttcgtaagtgattttctctaccatttgttttctattccattgatttctgcttatatctgtattatttcctaccttctaccttctatggatttaatcttgctgttctttttctagcttctttacctggaagcttaaatcatagatttttcagctttgtcttttctaatagatgtatttaaaaacttaaatttccatctaaggagtgctcaaaccatatcccagaaattttgttcttttgcgtttttcctttgatcattcggtttaagatattttctaattttcctgttgatttctgtttttctccatagattatttagaattgtgttgctcaacttacaaatatttgggggcttcccagatatctttatgttattgatttttaatttgattctattgtggccagaatacatattttgtatgatttaactattaatacttattgagacttatcatatggccaaatttagggtttatctgggtgaattttccttgtacccttgaaaataatttgtattctgcaatttgtgtattgcattataaatgtccattaggtcaggtttgttggtagagttgttaaaatcttgtgtattcttaccaacttcttgcctaattgttttatcaattactgagaggtaggtgttaaaatttccattatgattgtagagttttctatttctccttttctctctgtcaattttttgctgtatgtcttttgagatatttttattaggtatatataaattcaggaaacgtatgtcttcttgaagagttgacctttttatcattatgtaaagaccctctttattttcataatactcttttctttggatttttctttgtctgatatcagtatagatacatcagattctttatacttagtacagtataactttttctatataatttttatttttacctgtctgtacatttaaaatatgttttttaggaataaaatgcattcatatcttgcttcttttcgagtccaacaatctttcccgtttatttggagtgtttagttgatttatatttaatgtatattgttatgtttggattttagtcttccacattgctatttgttttatgctcctcctttgtccctggtttcctgttctgtttgggttcatcagatatgctgtggtattccattctatctcctctattggcttttaagctctccctctttctactatttttaaatgattgctccaaagatttcagtgtgcactcataatttaccacattctgcattaaattaatattatgtgacttcacatataatgtaagattcttacaacagtgtaattttatttacatataatgttcttttgtgtgattgtgtttatatatttcagatgattattatataggtaataaattttacaattaattgctattactattgctttaaacagcttcttctaaataatttagcatgagaaacaaaaccaattttcatatttaccaacatatttacatttctactcttctaccctcctgtgcagcagacttctagttggtatcattccctaaagcctgacgttcttccaccgtcatttattgtaaaatgattttgctggtgacaaattctctcaccgttaatttatctgcaaatgtctttgttttagttccattttaaataaatttttcactggatatagaaatccctttttgatatttgttgctttcagcactttaaatatttcttccactgtcttttcgtctccatttttcctgataataacacatcaattatttttaatattttgctcctttatattatgtctggtttttctctggatgtatttgagattttctctctgtaattggttttcaatagtttctttttgttgtggttagttatggttgtatttattttgccctctattcattaatattcctggatctgtagggttgttattttttaataactttggaaaatctcagctatcttttcctcatatatagtcgtgtgtcacataacaacattttggtcaacaacaaaccacgtatatggtggtggtctcatatgattatcatggaactgaaaatttcctatcaccacgtgatgtcatagctgtagtaacattgtatcacatttataatgtatttttactgtaccttttctaggtttagttatacaaatacttaccattgtgctataattgcctacaggatgcagtacagttacatgctatgtaggtttgtagcttgggagcaataggctctgctatacggcctaaatgtataataggccataccatctaagtttgtgtaaatacactttatatgttcacacgatgacaaaatcgcccaacaactcatttcttaaaacatacccagttgttaagtgacacataactgtatttcttctgtcgtattttctcctcttcttttggagtgcatattagatcacttgatactgtatcacaggtcactgagggtctaggtatgttttcaatttttattctctctgagtttaatttggatggtttttattcactgccttcaaatttactgattttttgatgtgttcaatattctgttaatcgccacaaaaattttaatttccatttggttcttttaagagttatcatatttttccagaaattccctattttttactcattatatacatgtttgcctatagattctttaacatatttattatagctattttaaagatcttttcagcttattccaaattttcagataaccatgtgtctatttctattggtagttttgtttttcttgaataagcaccacatattcaagtttcttccaatctgctaatttttattgtatactaaatgatatggatagtatggtataaagattctggattctattaaatttcttgaagaatgctgaatattgttctacctggcagttcaattcctggtatcaacttgatcctgcagtgatggagttttagattttgttatagcagggctatttccaatgccctttgtcttacgtgtatcccttggacttggcatacgggctttattgttaatgtgtgggttttctggggtaattttatttaaaaaatttcatttagtatttcttttttttaagtttattattattatactttaagttttagggtacatgtgcacaatgtgcaggtttgttacatatgtatacatgtgccatgttggtgtgctgcacccattaactggtcagttagcgttaggtatatctcctaacgctatccctcccccctccccccaccccacaacagtccccagtgtgtgatgttccccttcctgtgtccatgtgttctcattgttcaattcccaccgatagactagattaagaaaatgtggcacatattcaccatggaatactatgcagccataaaaaatgatgagttcatgtcctttgtagggacatggatgaaactggaaaccatcattctcagcaaactatcgcaaggacaaaaaatcaacaccgcatgttctcatttagtgtttcttatagtgaagtctgttggcaacaaattgtcttagctgtcattcattagaaaacatttccattgtgctttcacttgttattgagttacatagtagacagaattctaccatctccaccccaagatttctggcccctggttatttagtaaaaaaccaatctccttaaagctggtaagcaacttcagcaaagtctcaggatacaaaatcagtgtgcaaaaatcacaagcattcctatacaccaataatagacaaacagagagccaaattatgagtgaactcccattcacaattgctacaaagagaataaaatacctaggaatacaacttacaagggatgtcaaggacttcttcaaagggaactacaaaccattcctcaaggaaataaggacacaaacaaatggaaaacattccatgctcatggatagaaagaatcaatatcatgaaaatggccatactgcccaaagtaatttatagattcaatggtattcccatcaagctaccactgactttcttcgcagaattagaaaaaaactgctttaaatttcatatggaaccaataaagagcccgcattgccaagacaatcctaagcaaaaagaacaaagctggttgcatcacgctacctaacttcaaactatactacaaggcttttatcacctagtgatatcatagccatagtaacattgctaaggagagaatccagctcagctgtgcccagaatattacctacagaaatggtgagataataaatgggtattgttttaagtcattaactttgtggtaatttgttacatagcaagagaaaactaatgcactatccttttgttcattatttaagtttttacttccctcctaaatatgcttgttagtatttattttagggtctttgaatagttgctttttgtattctgtcaagttttaaattataatcagtgagaaaaaaaggctgtagtgggcttattctatcttggcttgcctcagaagtgtttaggggtaaatttaagaaaatatttgcatggtatattcactgaaaactataaaacctgctatgttagacttttaaataccaaaataaatgaagagatagatcatacttatggaatggaagatcaaaattgtttggaagccattatccttagtaaactaattcaggaacagaaaaccaaacactgcatgttctcactgacatgtgggagctgaacaatgagaatacatggacacaggaaggggaacaacacacactgtggcctgtggagcagggtgtttgggtcagggggatggagagcatcaggaaaaatagctaaggcatgctgggcttaattcttaggtgatggtttgataggtacagcaaaccaccatgacacacgtttacctgtgtaacaaacctgcacatcctgcatacgtaccccagaacttaaaataaaaaaaaaaaagatgccagttgcctctaaagtcattcatagattcaaagtgattccagtttaacccaacaacctttatttggtaacagttgacaaatggattctaaaatgtgtatggaaatgaaagggacatagaatatccaaaacaatattgaaaacgaggccgggcgcagtggctcacccctgtaatcccagcactttgtgaggctgaggcgggcagatcacgaggtcaggagtttgagactggcctggccaatatggtgaaaccctgtctctactaaaattacagaaattagccgggcatggtggcatgcacctgtattcctagctactcgggaggctgaggcaagagaattgcttgaacccgggaggtggaggttgcagtgagccgtgatcgcgccaccgcaatccagcctgggcaacagagtgagactccattacaaaaagaaaaaaaatgtgtggtacttgataaggattgagaaatagatcaatgaaacagaatttggaggataaaaaagactaatatacaataaattgacttttgataaaggtatcaaataaattttttagagaaagcaaattcttttcaacaaatggccctgaaacatctagatattcgtatggggaaaaaacaaaacttaattcatacattacatcatacagaaaaaaaaatgtttttaattagatcttagtctgaacataaaagctaaaaccataatgcttttagaggaaaacatagatagatatttccgtgacttggcataggcagattttcttaggatacaaaaagcagtaactgtaaaagaaaaaaattgatagattagatttaaatttttaaactacttttatcagaaaacaccgctaggaaaatgaataggaaagccacagacaaggagaaaatatttgcaaaacataactgacaaattactgatatctaggatatgtaaaaaacttcaataactcaataataacaagatgtattatccaattttgaaaaatggagaaaactttgaatagatacttcacgaaagaagatatacaagtggccaataatcacatgaaaaggtgatcgatgtcgttagccatcagagaaatgcaaattaaaaccacaatgaggtagctccatatacccaccagaatgtctgttattacagcaactgatatcatcacaaaggttgtgcaaggatctggaacaattggaatttccacacattgttctgagtgtgaaatggtttggcagtttttaaataaaacacaacatatacctactttttgacccagcaattccacttcttgttatatacctaagataaattaaggcagtggtctacaaaaagacctgtgcagaaatactcatagcagctttatttataatagataaaagctggaaataaaacaggtttttataaataggaaagtggatatttgtaataactaaaacctgtcaataaaccaaaagtccagcaagaggaatggattttttaagttatggtatattcatataatggagtcctacaaatcctaccagtataatatggtggtagttatttttatgtttatgaatatataataatgccaacttcaggataaatggttaaaaacataaaattattattaaaaatagccaacaaacaccagcatcttttgggtttctttttgttcttcactgtttctatgctagcactataaattgtaagtttgaattgtagctcttaaagcaatgcagtttttctttcatttttaaattgagctctttactctaggaaccccaggccctcctggaccaaaaggtattagtggccctcctgggaaccccggccttccaggagaacctggtcctgtaggtaagcatgaaaaataacagtttgctgttttataaaactaatgtttatcatattaagtttgggaaagtcaaatcatgttcagctgtgaacattttcaacacaaggaaatatagtgttcattcacttaacactgcatgtgaggtacagaatgaataacttttaataaaaagtgcttaaaattggctgggcacagtggctcacgcctgtaatcccaacattttgggaggccgaggtgggaggatcacttgaggtcaggagctcgagactagcttggtcaacatggtgatacgccatttctattaaaaatacaaaatattagctgagcatggggatgggctcctgtaatcccagctacttcggaggttaaggcacgagaagtgcttgaacccaaggggtggaggttgcagtgagccaagatcgtgccactgcactccagcctgggtgacaaagcaagaccctcgaaaaaaaaaaaaggacttaaaatgatcatatgtgaccttattttctaggcccactttttccagggagagttaattcaagtgtcctagaatagaagctttgatttttttagaatggcaggctgtagtaagtaagtttgtttattgatttctaaagtaaataacttctcttggccccatatgaggcctataattctccccaccacccttcgcaccttactctcttagatattctgaaactatattaaaatgaagaactgaaaggttttagatgctgaatgactattccttattttcattatcctccttcatatttttataacattttgtgatccaaaggagtgtctcaaaagcaccttgtttcttttggataaagaagggagcatatggaagtaaaagggagttggaaattggaaaactgggtgtaacctgctgtactcaattttttaggtggtggaggtcatcctgggcaaccagggcctccaggcgaaaaaggcaaacccggtcaagatggtattcctggaccagctggacagaagggtgaaccaggtgctgtagtttttcatttttcctatttttctaattttctctgtgttgaatttaacttgcctttttattacccacagtgaaattgtatcttctttcttactaagctaccacacactttccccttttcctagttaccgtcttcctcttcatcctgagactattagctcatgtatcttgatcaagttgcctcttacaaaaaaccccatatcttttcttgtctaattttttatatcaaaaagaagttacctagcctttgcaaatttctctgtggtttactatgcaatctatatttcatttatatttttttcttataagcatatagatatatttaacattcatcggaaatagaatatatgtttagatcattttctcatgttagaattgcagttctgtgttggaaataaatcttctgcatgtttcatataatatacattgctgcacctaatgaaaacctcaatgatctaaaaataatttggccttgtttcagtttgtattatccacttgagtttttgttttgttttgttttgtactctgacaggtcaaccaggctttggaaacccaggaccccctggacttccaggactttctggtaaaccttaataaaacatgctaaatcaatctataataaaatgagattatttccaaatacatctatttttccatctccaccttttactatcataaaatgcatgtaagaacccagaaaactcaaacctagtgttaacgttaaaacatttattatttagcaacttagtttaaggagttgtgttaaataaaaatgtatccttacggaaatttacatgtagagatctcttcactaaattcataaataagtgctgaggaaataagaaagaaggcaaaattgcaggaagataagaaaagtctgtagaaataagaaaagtctgtagaaatatacgccaataataaaaatgtttctggaaatttcagtcttaatatatgttttgcatatttgggtagatgtgtgtgtgcacacacacatctaccctccctcttttgtgcttactcttactgtgagcaccaaatagtagaaggactgaatgtacatacagacatgtatgtttatgttctgaaatgacgactggccattttatggagacttttctcaaaccatacacatatctcctgtaaagtcaaatagatatccttcccatgataccaacatggaaattattactttaatgtgccactgttacattgctcttaaaagtgtcagaggtagagaaaaaatgttgagaacaattttgctagacggtgattataaatattgggtagaatggtcttcggggacacatgacaaccattgaagagccatatctttcattagtctcaaaattagactcaaaatatttgttttagaaatttcctccagccatcttgaaactatttttgaagatactttatactttttttcctcacagctattggtgatgtatcattgctctgtcttaacacaaaggataccttttaggatgaaagctattattatttctacatttctatatatactctaataaatacttctgctaacaaatgcatatatttaataggaaggatggttttctgggtagatttgggatttggtaggagatagaaatgactcttgtgaattccattaattgccctaatgtatgtgaatagctaaccttataagcaagcttgtaactcggtattatttatcttctaattatactttactttcataggccaaaagggtgatggaggattacctgggattccaggaaatcctggccttccaggtccaaagggcgaaccaggctttcacggtttccctggtgtgcagggtcccccaggccctcctggttctccgggtccagctctggaaggacctaaaggcaaccctgggccccaaggtcctcctgggagaccaggtatgtccgtgagtggtaggagaatggtctatttattagtccatgtatttcgttttgctggcaggttattcagtctttaagactttagaatttttccggtgcattggaggatgttaaaaaaaagactttaaaatttgtgatataacttcttacaagtaaatagcttggttcatagctaactccatctatttccatggttctaataatttgctttagtaatgcattttatcatttatatagaggaagtaaaacaatttggaggaataaaggaaatggtagttttattagtcttgttactaaaaggtaaaactatactgttaacctgtcagcaaaatgccatctgcatttttaaatgtgagcttctcagcatgtcatcacagaaatcattttagtgatcacccaatagatgcttgtggtccataccagaagtattgctttggttctgtcatatgatcagcaaatctcaccaggcacaattaaaaaaattatcttctataggaactgggcaatcaaatttatctccaacatcacagcatgatcaaattgactagtgatctcttcataccaacctcatgtctatacctcatttgtcttgtgttcactgctctagtagtctcagttttgcatccaatgttcaccttttcattttgtatctgtgctgtgtcatttcattttactaattttggaaatgctcgttttcatccttgattaatgtcactgagcctagtcactggtgataggttatgaacagattttgagacttgatattcaaattttatatttctggtcactgaaaacttggaagtaaatgtccttttattctttgaaagtctctgacattatataagtgcatttcaaaatgaaaaatgttatttatattacagtaaaatctaaagtgattggaattcattttaataagatgttctaaacacatgaattaaatgggatcacatactgtgttcagaggatcattttcaaaaccaaattttatctgatctgacataatctgatggaaagtattgtttaaggttttatgtttgtatactactgaagaaaaccagtgaaaatctcctcagccatgttaactctcttgcatgtaatgtaaagaactgaagcaagtatcttgcttggttttgcatgcagtaattcaaataaaccaaactattatcttttttatattttaatcatcactgtggttattcgttcttactagtaatgaatgagtaatgagctcactgttgaaccttactttgaaatttgtcggtatgaagccattagtcacaaagatgtcctaaaaattacatttttaaagaaataataacaaaagtagttagaagaatgcacacctgatgagtgtttgtgacttctcaaattatttcataaactataaattaaaactgagttgtaaaccccattgctcttagaattgattgttcttagtctgagctcatagtaatgattatgatagcaatgacttttggcctttaaaaatacgccacagtgtgctgttttcattttagttttgtcactaagtggtgataatttggtttatatacagatgcatggatatgaactttcagagtattcttttattgaaatgaattttaacttgaaagtatttagtgtaatgctttttagtttcttgatatttctaacagttttgatatttttcctttttgttaatgatgacattgggccttggtgaactttgatccctatccaggtcctacaggttagctccttaactccaaagtagtaactgcatgaagtttgaaacttatatacctgtaccaaatgttttcaagtgtttgaatgtattttaagagcatatgtgccaattcaattcttacatagtggcttatctctttaagtttttaggaacttgtagaacccagtgtttctgtctattggaaagacccaaaattacctaactaggaaaactaatttaacatttaaaaattcatatatttgtgtcattttcagttgaaaatctgtagtaccgaaaacagccttacatattctacctttctttggagtctgtttcttatgtttaatttatatctgttaatgcaaacgaattgaactatccttcaaaaggacattctttttttaaacaataatatgtattatcagatcttgaaaatatgtaattcttaacttgccatatcttttgcaggttttcaaactatcccaccttcacattttgggttgtcacaaagttctcaattctactgctgttaaaaatggactaatagggccgggcaccatggctcatgactgtaatcccagcactttgggaggccaaggcgggtggatcacctgagatcaggagttcaagactcgcctgaccaatatagtgaaaccccatctctactaaaaatataaaaattatccaggcgtgttggtgtgcgcctgtagtcccagctactagggaggctgagaaaggagaattgcttgaacctgggaggtggaggttgcagtgagctgagattgcaccactgcaccgcagccagggcgagactaataggcacagagaaaaaaaaaatcaatgcaaccagcacagattacgaggttcttaatcttattttcattatacatgtgtaaacagtacacaccaaagaacaattaccaagagctacctaatggaaaattgctgattcttagtgaaagatgtttgtttacctaattagcagtaaaaaaagccacaaatatttgaatgtatttattgttattcaaaataaatagtccttttcaaattgttaagaaagaatcaaaagaggtaatagtataccccatgatatctggctgttgagaatggcaggacattttttcatcttataaaattaaaaaaaataatttttcaagattatttttagggagccatttgtttctacctgaattgattctctagtttcttactccactgcaaactcattatttcatagaaccatagaatgtcagatctagaagggacctaagttttacctatgtcgaggagaaattatccacaagacagattttattcaggactattgcagtagagtagaaactattgcagtaggagagagactgagctcaacttcaaatacaacaaagaaaagtgattatttacagccaaggagcagagtgagagggccagtaatggaaaattactaagaggagacatcaagggtagagaggggtgggttcttgttaaactggcccaacaggatttttgccagaaacaggccaaggatttagacatcaaaggtgggagatcaggaacttgatcagatatcggggtgaagggactctctctaaaccgatttagcaggattattgatgtaaatggatttggaaggccaaaaagtaggcccaaggatgaggcctaattgagaggagggctcagaggagcctgtctaaagtttgatcaaggaatctttgtcacatatgaaaaaatggaggcccaaagaggttaagaaacttgctcagggtaatactgttagttagtggcataactgggactctgacttaaggctccccagtgatcaattaggtgtctattctacagggagcagactgttcgctgcatccactttcttgttttctgttacctcaaaagctccgtcaacacctccatcaaccagattgcttcttgtgttcttcttaaatgatgtcatcaaaaagattaagacagtgcatactatttaactatcactaagataaagcaaagactagggggttactttgaagtaatgttgagtcccaccttatctgacctacatagaattttgccactttgattactgctaaactctactgttagctaggagatttctatcttctgagttactataatatattcaaagaagaaaaagaaaagtagccacattcctttaaaagaaatttaacaatttattatttacaaaatgtgctctaaattgcatagttgttggaacttggtctctgtgatgttttcttctttgcaagactacaaccttaagtggaaactgaatttaaaatataccagtcaattcatcagtatacctttagtaattactacttatggacaatattttaggtttttgttttgttttctttttcagtttaactttgttacacagttgaaaaataatggattgtggacctcatacaaaaaaaaattgacttggcatatagctcattaaaatgttgctttttaaaatagagtcttagaagttttgctatgatatgatccacagttttccttgctaattactcaggctgaaatgtcatatttcaatgaaatattttgctgagagttcttgttattggtccctctatatcaaacacatatataaaatgtctttactcaaaccttgagttgtcttagttgggaattctaatttatttaactaattttgtggccagactctgctctaagtattgtcttgagttaatttgctgtctgtgatttagaaacaatttaaataaacagaagccaatatttagctttctgaatttcaaagtatcaaatgctttgaaagttttattaggagataatgataatgttttctatttatatgacatgccacaatttacatcatataatgtacttttattgtaagcatcttaagggcagagtttgagtcttgctcatctttgtgtttcctgtagcaccttgcacatggcagacattaggccagtattttacaacttgaatttgatctttaaaacattcctgtgagggaggttagggcagataccagtattcccattttacaggtaaaaaaccatactcagaaagattgaattgcccaaagtcatatagttattaagtagcagagtcaaaaatagatcctaggtcttccaactcctaggattcattgctctagcacaatttattctctctgctaacatttggtgcttataaatcatagcaaaacttgtaagaaaagaaaattgtgtttttagtcaattaacactaaccaaggggtgctctatttgtaggcttttaatctttttatttaatgatccttcttttaatagtgaatagcctgtcttaatatgtgcattgaataataatagagtaaatatgatattttctgtggttcggggtgggatattgcatgccaaaacattttcaagtaccctttcactgataggcttcatatcttggaaaagttgaatctttatttttgtgttcaatgttgtacaaatatatattggctttttctccttaagtaacttattgcaagtactataataataatataataataataataataataataggccaggcatggtggctcacgcctgtaatcccagcactttgggaggccgaggtgggtggatcacctgaggtcaggaattcaagaccagcctggccaacatggtaacaccccgtttctactaaaaatatgaaaattagccaggcgtggtggtgggtgcctgtaatcacagctgctcgggaggctgagccaggagaatccctagaacccagaaggtggaggttgcagtgagctgagatcacaccattgcactccagcctgggcgacagagtgagactctgtccaaataataataataataataattcaataaatagtaataggaaagcctcctggtgaattatgaaaaaaatcagaatgtggcttcatgaaatgcttttcaaatacaagcaaaagtacagttggtaatggccatcgtatattcatgttttgatttttctattctgtcacccatgatctttatatttattgccaatgaggcctttaaagtcaactgtatcttcttgaagcagtctgagcatatcaagaaattggcacctggtgtttttattaaaagataacacaagccaagataaacttcagcattaatccaaaaatacccctttactaaaggaatttgaaggctgttggtgaaatggtactatctagccaactttaatgttttgagaagctaatttttggaaagccacagtagcagtgttaacatgatgtcttcagtagagttttctattttctggattaacgaagaccaacagcttatcctttagaataagctctatttgaaaaagtttggctctctatacttctgtatggttctgtttgcatactgattatgctgtaagtataagaaatgctggcaaagaacattattgttttaacttgtactataatgtgaaccacttctaactcataatcttattttgtactgtgtgatgtctgatactgctaacatcgatctttgggctttggtgaactctgatcttcccaggttttcaaggttagactcttcactggtcaattcttttttttttttttttttaatgctttgtgtgtgtgataagagaaatgcaattttttgctataattcagaagtcattggagagtgctgttatcctcaagctggggttttaacattttgatgaaggtaatgtgacttgattataattaagtttcaaatgacgttagggtctttgtgtttgcaattgtttataataagtaatcaatacataaagacatgttgaattttaaacggaaatacacttatttttaccttcaagactgcattaaaatatttaggcaagcatatgacctatttgtaatctctgaatgttgattttattttctcaaaattttgttttctcagattgccctgatctgtgtatttatggctattttcagtgatggcagagatatactattgaatactgttaaaaataaaacttatatgttctttatgtaattaataactcataatttgaaggactctaaacatcaggtctgaattaacatgcaagtttcccatttttttttaatttcgaaaagtgcagtgccttaggttatttcagatgatacagtgttctgataacttttaaaatggagtagagggtcataaaaggtttctttttttcccatcttactttgttattgttatcaggttgattcacagtttatttatttttcataattagctgatttgctacttaatttctagtgcaaatcatacattgtggattaaattgacaagtttgcttagaacactgaagttctgtttttttattcaaatgtacaatgtactaaaccttttcgttatgattgagaagggaatttctgtgttgactggttgccagcctagggtgactatatgagttaaattgtttaaatgtaaaacaattgttgtactattgtaaatctccttcctctttctcatatgccagatagagtcatgttatattatgaaattacatagaaatacctgaaagattaaaaagatgctcatattttaagatttgtttttatcttcaattttactaataaagaaaataataataattttaaaaagtccttccatagcttctactatataccaggcactgtgctaagtaatttttacattgtatctcatttaatccttggaacaacctgctaaagtaggtgctattcttaattccattttatagaagaagaaattgaagccaaggagattaataatcttactgaagtcaaacagctaataactaatggagctgtatttgtaacccagcattctagctccaaagtcctgtgttcttaatcacagtgtcattctgccttgttagtattttgccattgattctgaatcttaagagtattggaaagggaactaaagtctgaattttattttaggttaaaaagacaaccctttgtccataagaatgaactctattctaaattcataacaagtgcctattatagttcctcaaaaaataatccctacatatcttcattttttgttgaaatcaataaaatttgaaatgaccagaggagagaaggtgtaaatgctaactattggctgttcattatttagggttttgtaattattttcttaaggcaggattacttagtctcagcctcagccactgaacactctgcaagcaagtaacacctatttgccacctggtgacaaaagacttggccaatgataagatctccctggttgcttaatggacctcatacctttattcagaaaaagaaattaaaaacacagcaaaagtaaaaatgctaagcaaaatccagttttaaattattttgtttattcacaagatacatacagaattctttatttttcttgaaaaatatttaaaatgtaaagaatatgaaaacattttaaaaatgaattttaaagtactttattgattcaataaatttctaacatttaaaaaaattcctatgtatcaagcatatcactaaaatgaaattagtttgcttaaattgctatctgtattgcatagtaataaaagctgaataaatgtaactacttacaaataaagcaatttgatcttaatcacaatgagacatggcttgaatttctgattgccctacagcagtgatgcttaaagtgtggtcctggaactagcagctttagcttccacaaagcacttgttagaatgcaaattattgggcctctcctaagtctcttttttctaaattatttattcttaagactggtcaagtgcagtaacgagaagggaggaaagagttgaacaaggagttcaatctataactgaacaatcaattgagataactcactaccttcagaccagtctcctcagtcttacggaatccaaaactcttggggtgggcccaggaatctgttttaacaagccctctagttgattctgatgcatgctccaatttgagaaaataccctacagtttctgtttaatttaactttaagtcaaactctttgttaagaattacagagccacacattgttaagccatgagtctttttctttagatgttattttattgaatttaatatataataaaatgtaaactaaaagagtctgcaaatcagtgttcataacaaaaagaatccagttcaatttatattagaaagggaatcagcataggtctagatattttaatgttgtgtgggttttattctgcaaactaataggaagatgactgatattttaaaagcctgacttttatgctactcttaacactatactgaaatgtcgtcatttgctgtggattattaaggtctaccaggtccagaaggtcctccaggtctccctggaaatggaggtattaaaggagagaagggaaatccaggccaacctgggctacctggcttgcctggtttgaaaggagatcaaggaccaccaggactccaggtaggaaatggaagtagatatctgatgagagaagaatgtgggtgtttgtattcaaaatgtgaattctaagctgcatcattttaattaacactcactagacaaggttctatgtgtggctcactggcgaattaaaaagacagtagaaggcaagtttcctatagtctcctaaagggactttgttgtattatagtcagagttcctgaaaagatacttcacctggagtctttggtatgcatatttggatttgagtagccttcatttcagtgaaagcaaatttatgcaaaggagacatgcatattagagcattgcatatagatgaatccacccatagagaagtaattatggtgaatagaggcatcttttaggctttgaaattagataaagttagggtcaaatgtcagctcccctgcacacttctgctttgtatctatgaggaaaacagacactgggtttctgtcttcacctataaaaagagaataataacatatccactcatgtgctttctatgttggtttgagtgacccagagcagagagtcacattcctctttatgggttctcaaaactgcctccattcggtcaagatgattgctggtggatttggcagtcaacacaatctggactgtcttttaattctgaagactgctttatggcagaaaaaaagtatttaaagtagtgatccttaaagcttttcaaaatctaatctttttccccatgccatcactattcttccagttacctagacttaaaaatttacttctgtttactcattctctactcactccctataaatatgcatatttccagaaacaattaagagtaagtttcacctgctatacccctttaccactaaatattttaatgcagatttcttaagattaaaaatattctcatgttttattataagatgacaataaaaagctatgggattgtttatattttataaaattcttaccaaatgtcttggctgcagcctgtaatcctagcaacttgagaggctggggcaggagggttgcttgaggccaggaatttgagacgagcctggacaacatagcaagaccctgtctctaaattttttttaattatataaccacagtacacttattaacttcagaaaatttaacatagatatacattaatttctatctttcatattccagttgggtccaatgacctaataatgttcttagcatttcttcttccagtacaggatccaggccaagtcatgttttgcatttaattgtcatatctctttagccttctttaatctgaaacagttcctaagtttattttctttttttcatgacctcgacatttttaagaaattgtaccaccacccccatttttaaatagaatattccttttttgcctgatgtttattcataattagattcaggttatgcatccccagctggaatactacatgagtggttctgtgtccttctcaggctaaccgataaggaggtccatgatgtctatctgcttctcatttgtggttttagttttaatcatccagtcaagttgttgctcagtttctccactgcatcattaggtttttccttgcaactaataaaactgtaggaaggcacattaagatagtgcaaatataccaatactcatcaaaaatttcccttagatttaacatctattaatgattttgcctcaaccagtctctagtgggatagtggcaaaatgatgttgtttcaactctagcactacctccacatatactagtcagtcctactgtaagcaagagccctcccttctctctggtttacctatgcatttcttatcatttttgactcattttttctcatgttttccactaatttacaatttctaaactatcattacttatttcgatgctctcattgttccagatttggaagccccttcaagctggatttgatgtttttctgatatgtacttccctccaactatttttttagcactttttaatattatttcataataagatgctccaggcttgttcctctttcattcttactaacataagcttcgttgtcctgcacttgaagtagagcaatagcctcctatatgatcttgctattctatattcttcctgtagttgggtggctgaggggggatgattgtttgagcctaggagtttgaggccagcctgggcatcatagtgagatcctatctctatagaaaagaaagaaaaaacaaagaataaaataatagttacctttcattaagtacacaccacacaccagtcttctaagcacttaatattgtcagcaaaagacaatgagatctagaggagaaaaaggaagagctttattttctgtaaaaagtaatctgcggattgggaaggcacagctttctgtacaagcgaaagtgtgatctctgaagaacaaagggagggtttggcttaagtagggaaagttctcacccatgttctcaaccaggtccatttatgcaaatgaaggattcagacttatcagttctgattgattgaaatacttgagccctgatcaggtgatttccaaaaccaaagccagaagtctgccagatgtttctttcaaatggccaatgggcagggggtgtgttcaagccacagtttatcttcgcagtggtttgacttgattgtacaaagggagatcctgtgacacttttacaacatctttccaagaacacaaggtatgtgacatttcccttacccaaccacggccagttggttgtgttttaactttgcgcacctcagttagccatgggaagttcattttgtctgtcagccaggggtatattttaacaatatgaactgtctcatttaattctcaccacaaccctatgaagtaaatactgttattttctccaaatttgaggtgagaaaactatgaatcaaggaggttaaataatcaactcaattcacacaagataatataaggcaaaattgagattacagtcttggaagtttgactctagaaatagtgctatatgccactatgtaattcttatgccctcaatcaccttcctcccctcgctgcaatttttttgtaacattaatgattttatttattcagggtaatcctggccggccgggtctcaatggaatgaaaggagatcctggtctccctggtgttccaggattcccaggtatttgaagggatttttgtggtttccctttatattaaactcctctgggacaagatagccattttctgatttgactgggtaaaggttgtagccctgttgctttgccataaaactgtatgtaccttctgtgcaggcatgaaaggacccagtggagtacctggatcagctggccctgagggggaaccgggacttattggtcctccaggtaagacttattcctgaagatagttatacctgatacttagatgctttaaagaatttgaaagttttcattctgtctttcagccagaccatcggaggctaagtccccaacaactgaggcaaaataaacaaggctctgcctttatttactaatctcttaaattctctattttagtaacataatattgatagcagaccttttaaagttaagataaatgcaggatcaacaaaaatgcttccttgacattagcttctatactaacttccccaaattcaattgaacagatcacaagagcaagtcacatatgaattttttataatattttcgatattaaaatagttctttttcctaagaggcttatagaggtttcttataaattgagaaataaggaatctgctaaattcccctactagatcaaagggtccctggacaagcacagcaagcaaaaactgcaaatgatgttggagtcagaatggatgtgtaagggaataaaattgtcttcccctgacaccagtgttcacagatttgaacacagatggatgagactttgtagtaactgagtaagattcaaggtttgaaaatagagatgatatgcttaatttttacactgaccctaagaaacttatttttcaattgaaaattatttttcaattttaagttttcctaaacagatttctgttagatatggcagcaattcaaaaactggtttctctcacaccaatttttgtcctgaacttaggtcactttggcttccatttcttgtaacctttctctttcccttcaaatttgtgtgttttgtctcataggtcctcctggattacctggtccttcaggacagagtatcataattaaaggagatgctggtcctccaggaatccctggccagcctgggctaaagggtctaccaggaccccaaggacctcaaggcttaccaggtaccaatgcagatcatctttattatcattattatacttttaatttctgggatacatgtgcagaatgtacaggtttgttacataggtatacacttgccatggtggtttgctgcacctatcaacccatcatctacgttagatatttctcctaatgctatccctcctctagcccccctaccccttgacaggccctggtgtgtgatgggcccctccctgtgtccatgtgttctcattgttcaactcccacttatgagtgaaaacatgtggtgtttggttttctgttcctgtattagtttgctgagaatgatggttttgtccatgcaaaggacatgaactcatcaattttcatggctgcatagtattccatggtgtatatgtgccacattttctttatccagcctatcattaataggcatttggattggttccaagtctttgctattgtgaacagtgctgcaataaacatacgtgggcatgtgtctttatagtagaataatttataatcctttgggtatataccaaaatgggatggttgggtcaaatggtatttctagttctagatccttgaggaatcgccacactgtcttccacaatggttgaactaatttacactcccacaaacagtggaaaagcattcctatttctccacatcctctccagcatctgttgtttcctgactttttaatgatcaccattctaactggtgtgagataatatctcactgtggctttgatttgcatttctctagtgaccacagatgatgagcttttttcatatgtttgttggcctcataaatgtctttttttgagaagtgtctgttcatatcctttgcccactttttgatgggattgtggttgtttttttcttgtaaatttgtttaagttccttgtagattctggatattagccctttgtcagatggatagattgccaaaattttctcccattctgtaggttgcctgttcaaactgatgatagtttcttttgctgtgcagaagctccttagtttaattagatcccatttgtcaattttggcttttgttgccattgcttttggtgttttagtcatgaagtatttgtccatgcctatgtcctgaatggtattgcctaggttttcttctaggatttttatggttttaggtcttacatttaagtctttaacttatcttgagttaatttttgtataaggtgtaaggaaggggtccagtttcagttttccatgtatggctagccagttttcccaacaccatttgaatatgaaatcctttccccattgcttgtttttgtcaggtttgccaaatatcagatggttgtagatgggtggcattatttctgaggcctctgttctgttccattggtctatatatctgtttcggtaccagtaccatgctgttttggttactgtagccttgtagtatagtttgaagtcaggtagcgtgatgcctccagctttattctttttgcttatgattgtcttgtttatatgggctctttttttaattccatatgaaatttaaagtagtttttttctaattctgtaaagaaagtcaatagtagcttgatggggatagcattgaatctataaattactttgggaagtatggccattttcatgatattgattcttcctaaccatgagcatggaatatttttccatttgtttgtgccctctcttacttccttgagcagtggtttatagttttgcctgaagaggtcctccacatcccttgtaaattgtattcctaggtattttattctctttgtagcaattgtgaatgggagttcactcatgatttggctctctgtttgtctattattggtgtataggaatgcttgtgatttttgcacattgattttgtatcctgagactttgctgaagtcacttatcagcttgagattttgggctgagacaatgaggttttctaaatatagaatcatgtaatctgcaaacagagacaacttggcttactcttttcctaattgaatacccattatttcttcattttgcctgattgccctggccagaacttccaatactatgttgaataggagtgaactcaggattaagaaactcactcaaaaccgcacaactacatggaaactgtaccacatgctcctgaatgactactgggtaaataacgaaattaaggcagaagtaaataagttctttgaaaccaatgagaacaaagacacaatgtaccagaatctctgggacacagctaaagcggtgtttagagggaaacttatagcactaaatgcccacaggagaaagcaggaaagatctaaaatcaatacccttatatcaaaattaaaagaactagagaagcaagaacaaacaaattaaaaaactagcagaaggcaagaaataactaagatcatagcagaagtgaaggagatagagacacaaaaacccttcaaaaaatcaatgaatccaggagctggttttttgaaaagatcaacaaaattgatagcaagactaataaagaaaaaaagagagactcaaatagacacaataaaaaatgataaaggggatatcaccaccgatcccacagaaatacaaactaccatcagagaatactataaacacctctacccaaataaactagaaaatctagaagaaatggataaattcctggacacgtaccccctctcaagactaaaccaggaagaagtcgaatccttgaataggccaataaaaagttctgaaattgaggcagtaattaatagcctaccacccaaaaaaagtccaggaccagacggcttcacagccaaattctgccagaggtacaaagtagagctgataccattccttctgaaactattccaaatgatagaaaaagagggactcctccctaactaatttcatgaggtcagcgtcatcctgataccaaaacctggcagagacacaacaaaaaaagaaaatttcagtccaacgtccctgatgaacatcaatgcgaaaatcctcaaggaaatactggcaaaccaaatccagcagcacatcaaaaagcttatccaccacgattaagtcggcttcattgctgggatgcaaagctggttcaacatacacaaattaatagacgtaacccatcacatgaacataaccaataacaaaaaacacatgattatctcaatagatgcagaaaaggccttcaacaaaattcaacagcccttcatgctaaaaactctcaataaagtaggtattgatggaacatatctcaaaataataagagctatttatgacaaacccacagccaatatcatactgaatgggcaaaagctggaagcattccctttgaaaacggcacaagacaaggatgccctctctcaccactcctatgcagatcattcttttaaggcttattcattggagaacatttccctagttctccttttacatgtcagaggttgtctctgacaataggagtctaagcaactagtagaataccagaccaccacaagttccattttcttttttcttgaaagtgttaatttcccatggttgaatttctcttagactatgtcaggttactgttagcccctctggctgttccaatttgaacaactaattaatgttagaaaaatttataatgaaatgaaaatgcatttaagatctggtgctttctgtacatcatccagcagaaagattgaaggctgatttggtgggctatcagtttcccactgtgaagccccttgtcttttaaactaactggtgtctagctggccatttgactctacgtttatagccaactttcattaatcattataaaagaaaactagaactaacttcagtcttttgctcttattaagtgatcaagtgacagtcttatcaaaaacaaagtatacctggcagtaacttatggtggaatagaaaacgaaagttgggacttacattcttgtctgattctgaagacaaagagagcacaactccattaaaagcatcccagaagcaaatggattgtttaaaactaaagctaaatccttgttggcttctttggtcctggacttgagttatctcttcttttttctggatttaagacaaaaccaaattgtgaattcagtgtctcgagaaccttatgtctcctagatctgtccagatgtgaaaatattctactcatatttgaatgcctcattcttttcctgtaggtccaactggccctccaggagatcctggacgcaatggactccctggctttgatggtgcaggagggcgcaaaggagacccaggtctgccaggacagccaggtaagacaagtaaaacatgctgttggtggagggaaagtctttgagtctgagagacctctggacatagggcctccacttagagctgtgagatcttctcttgatgttagcatagctgactggtgaatgtggacctgaggaaaataggaaagcacataataaggagatttgtcactatcagagaagcatacaagattgcttttatttgtgtttagagcagtggaaaactcagttaaattttccaagcactcactgtacttacttgttcagcaaattttcaatatgttgatttaaatcccttgaccatattgaaactattgtgaatatttccacatttgaaaatatcgcagtaggctgtaatttctttcataaagagcagcaaatataaatgaacagtttaagtgattgccatagacctttaagagtcatggtgaagtttcatattgagatgataaattgatattaggagcattaataggtgctcctgataatattgagtctggtatctgttagattttcaatttgtactcaacctacttccaaaaagaatttgagtcaacttgaaataaaaaatactttaacgttaaggtttctaaaatagaaatagaggatcatacattatatatgttaacaactctagattatataaatatgactaataaataaacataaagagtttgtatttcaaatatcagtggcaacacagcagagtggtaatacctatagccttcctagagtcaatgccctgacatttcattaatgctatatttctagggaaataacaagttagtgtcatcttcatcacaagtgtttctgtgaagtttccctaaaatgaaaatttatacacagactgtccaaaggcctgtatatacagaaaattattaaatgaactcaaaccaagaggctaaatcaggaagggaagccagtggtggattgaaaatgggcattttgaaaatacttctttagaatgccctgcctgttctctacacaaaaaggtatgcctgagaataattcccccagacggattcaaaggaaaatgtttttcagcaatgaagctggcagattgatggcaaccacacccttcctttctcattgatgaacaaaacagcaggctgaaaattgaccatggggttcagattcttttagtacaacaagagactaaataacatacagactctccaaataagcatattttatttgtctcctagcccatgatatctgacaatgcctttatagacactctataaatatcaaataaattaactagtcaaatgaggtcataatgttttgtcaatatccataagagtggatcagagcttacttaatcttgtatactgattatttcgtggaaataggtacccgtggtttggatggtccccctggtccagatggattgcaaggtcccccaggtccccctggaacctcctctgttgcacatggatttcttattacacgccacagccagacaacggatgcaccacaatgcccacagggaacacttcaggtctatgaaggcttttctctcctgtatgtacaaggaaataaaagagcccacggtcaagacttgggtgagataatcaatatctaatttcctactgtgccttttgtttttgtttcagaaatcctgttgggttctagagtagccttggccaaagtgcctctctctattcttttggggcttccgaattgaaaaccatgtcaaaggcaactgaatatattcactatgatttttaaataaataatatttaaccttaaactaaaagcattaattagctcttgtgaggtacaattcttggcctaaagcagatcatttcaaaaaggccacatttacttttagttagattagttattaagggaacagtttccctgggctctttgcagtatagcagctgcttgagtgtgcagtgtttataattcctgggagatacttacctcatctttgaaactggtcttcatcaagttcataagttctgaagagaatcttggttcatagatcaaagaaagtaaggtcattgcttaattatgctagtttgtagttcctaaaataagtgccttagctttataaagtattgctggagtcatttaaagctatataaagtatgacatttctgtacaaaatccagttcatttaaggtgttcccatgtatcttctctatactggggtggacagctaggttgatgggatgaggggactaaatcactctcaaggactcttccatccccatgaattcttttcctggaattctgactttggatgttgaagtcccattgtcttacctggggctgcattttgttgttgttgttgttgttgtgttgtttttttttttgatacggagcctcgctctgtcgcccaggctggagtgcaatggcgtggtctcagctcactgctacctctgcctcccaggttcaagcaattcttctgcctcagcctccgaagtagctgggaattacaggcgcccgccagcatgcctggctaatttttgtatttttagtagagacggggtttcaccatgttggccaggctggtctcgaaatgttgacctcgtgatctgcccacctctgcctcccaaagtgttgggattacaggcgtgagccaccgcacctggcagggctgcctattttaagactgactatcccctttgcctccataaagacatttaagaagatagtctgggctcccagtttctgggatctctatgatgagaagcttcctgagatctcattgtctgggccattcattctgtggaaatgtttctgcagcagcagagaccccggaggtcagctttactccctatttttccaaggcatatggccacaccagttctggcccaccagggtaaggatattcacttacatgtaagtcagtggtcataggccattttatgaaaccaaataatgtaagggtttgcccaatagctttcttttccatcttctttttttcttccgtttatatttcctttttctccttttcaactttcctctgctacttttctttctccttttcacttggttacatctttttaaattttataattgaccaatcttcattaaattagtaattaaattatctttccataatttaatcgaataataaatatctaaataattaatttaatttaatatcttcaggtaattttctctagtctttctcctataaatttcttttttgttcattctctctacactgtcagacttataatcaaactttaaacttcaaatccctaacctaccaggtcaacagaggaaccattataagttttgagcactacgaattcaaaaatgtaatgcagttagaagatggaatctgctatcagcatgtaattataacttttcagaatccatgtattttctctaataagaacaatcagatttggaatctataaactggccctgactctggtacagtttaggcctcagacacaggaaggccatgacggagcccaagatcctaggaatggtcctggattgcagaggctctgctggggctcacacaaggatcacattggaagtatcttgatgactaagcaaagatacaggcagctgtcactttgatgttaaagaaacaattacctcctgatcgaataaatgcagtctgtgttgaattagtggaaggattataggatgtaagaaagaagacagagaagatggattaaatactaaagcttttctgtctgggagaaaagaaaaacatactgagaaccattagtctattaaagtcttataactatggggtatagagggcattgggagtatatgggatcactctctcttcgaaaatttggagactataacccagaattctgcatcattgtgggcagccacaggtgcaaccagatactccagatacttccatcattatgggccttccttttatttacctttcttttccttacgagactggatattttcagctctgtcccaaattaggcagtagaataggtttttttaaattactttataatgtacaaagcactttcatgtccattgtctaatttaatttacacaactatgattaagaaaaatgtatataaatattctgctttttcattttatacacaaagagactggctaataggttaaataacttacagttagaaagtgatggaggtaacacctgccaattctaaatccatttctttttaaattttcccatgttgttcactcttacatgactgtgagtcagtcaggtttttcttaacgagtttttgaaagggataaattagactaaatcaatgattttcaacctagggaattttttaagactcctagtcttatgccaaatccattgtataaaaattccaaataattctgataatacaggtttaagatctattggtcttttatcagtcatcttcagtctgagataagcatacccctttgaatatatgaagaatttccatgatgcacagaggcattattttttaaaaatcaaatttcaactcctcgacttttatatgtattttctcctaaagtcaatctgactttagcagatgtgctttgggcaatctcctttcccatgtctcctttgtctcctttcactgtcatgcattccccactttgtaagagtcatactcttgcacattgccttgaagtatgaaaacctctgacagacaaattcaaagggataattcaaaataacagctttgctaaagatacaattaccgttagatccagcaatcccattactggatatttacccaaaggaaaatagtatatcaaagagatagttacactgacatgtttattgtagcactattcacaatagcaaagatatggaatcaacctaagtatccaacaaaggatgaatggataaagaagatgtggtatatatacacaatggaatattattcagccatataaaaaatgaaatcatgtcatttgcagcaacatggttggaactggaagtcattatcttaagtgaaataagccaggcacaaaaaaaacaagtatcacatgttctcacgtatatatgggagctaaaaatttgaacacatggaggcagagagtggaaagacaggtagcagagacttggaagggtaagtgtggggaatggggaggatgaagagaagtgggttaagggatacaaacatacagtaagatagaaggaattaattccatatttgatagcagaagagaatgactatacttaaaaaatatattgtacatgagtgatggacaccctaaataccctgacttgatcactatggattatatacataaaaaaaatgttcatgtgccccataattttgcacaaataaaaaattaatggttttgttaaagtctccattaactcaagctctgtaattcacttttaatccaaccttctaagaaatacgtttctaataaaagtttttttgtaataattatataaaaatttataatacatatatttttatcagttgtgaattaataataacaatgacaggtcaaaataaaacatttaacacgtaaagtcttatagtcacaaagttttaaaaaggtatattcaatattaatttttgagaaatatgatagcatgatcaataaaaaactttcaaaaataaaaatatgttacattaggaaaaaactgtgtgagaaaagtggaatggaaatataatttttaaatgtagaaggaacaatgtataatttccaactgctaaagacaagtttatatattttctataatggttaatgttagatctcagatcattatattggatgcatttaaaagagtgatataaaagtttgttcttagatatcaatattcacaaaacaccataaatgaaaactggcaaggtagaaatgtggtttgcaaattcccagtccctgctattacaaagtggaataccgaagggtgggtgtggagctgagagacaatagctaaaatcttaatactggcacagtatcaatttaaacttacgatgaaatttagatatcaaaactttagatatgttaactttcaaaagtgtaagagagtgcatttttcatcattcttttgtgagtaaatgagaaaagaaaggcttgatcacaagtaaagataacctctcttgtccctactagctctgaatttcaaagattagtttctttctttttttggtttgtttgttttcccctcacatctttccttcctgtcttatttttttcctttttacgtattcttcaaacctgactgtggtggctgtgcacactggccagcattactattgtccctaggcctaagaagattgcagattcacacaagatacatactgaggaagtcttagaagaagagagggcagcctggagcacgaaatattgataagatatcgtaaggactcagtatgtgtccttcacttgtacacaatgaattactaaatatcctccataagacaccattgtttataagatgcatcactagtttaaaaacagcattagggaatatataatgagctaccacaataaatattaacatactttattaaacacatcctaattttataaatgttaaaatatgagtaaatcttagacttaagaaatatagtatatttattacctatgaaaggctggcaagtttccttgaaaggctgtttgctattgttttagaagaaaccaaagtatcattatcacgcagtcctttactgttttctctccaaatctttctagggacggctggcagctgccttcgtcgctttagtaccatgcctttcatgttctgcaacatcaataatgtttgcaactttgcttcaagaaatgactattcttactggctctctaccccagagcccatgccaatgagcatgcaacccctaaagggccagagcatccagccattcattagtcggtaaggcattgatttagctgtgacttttaccaatccccagttagttagctagtcagatttgagtccaaagctaacaatctgatgatattcctcctaggttaggtagaacagaggtacctcttaatattcaattaagtatttagtttgactcatatttattgggggtctgcttttgaccaggcccccatgatagacatagtgtaatagccagataatgcacagtgtagtaattatttattacataaatttgtctaatatatatcagatttgggctaagttctataatagatataataaaaatgttatgaaaacatagggaaagagatgtttagtttcaactggagaaatgtgggatggccatatggaaaaaatatgtcttgaactggtcagtccttgaatgactagaaggacttgaggcacaggcagttataaaggggaaatatacactaggcagataaatgacaatgggtaataaaacaatgtgtctaggatgtagtatgtaaaggttatgttgggagaaaagattgtaaagttagcttgggcccagatggtagaaggccttctgtaccaaattgtagtttaaagtttatttgatatgtaacaaggagccctgaaatattttagagctacacttcaggttagattatagtgccatcaatgtgtaacatggattacaaaagggatagtctcgaggtagagagaccagttggattgaagggtattgctatagccctgatgtgagtaaattggaactcacagtggggtacatgtatcacattattaggctagataggatttgacagttgattagctatgggaagaaggtggtagctgagatttggagcatgagtaactaagaggagggtgataccattaatagaaatctcttagagttttgccattttgaaacctagtttaactcaatctcttaggaatgttggttattgccgtttttattctgatcatgacccaggatttcaataaccataaaggatgaattgctggaaattctcgttcctttgatagtaaatataaagattaaagctggttcagccttagtagcaaattcatggtgccctttttaatacattttcctgaatcctttgggaatttgggtgtatgtgtgtgtgtgtgtgtgtgtgtgtgtgtacaattttgtcagtcccaactcttgggagtaaaagcttgtctaaatgtattaactattttgttaggtaaactgcaaaactggcctcagtaatatgtcaagaggtccactcatgttttttattaaagatatggaagtctcagctatattcattctgttgctatcttacttgattttatagatttcagccacatctccaagtgcctgggtacctgcccagcattctggatatggtgtacttctccagatatagtcaaatgtttataaatgtcctttggaccaagaataatgagtagagattgagaaagcgtccgtttcttatattttccagtctttctgacattgttcttaccacagtttcagcattactaaatgtctcccctccaattgagtactttgacaacaagtagtatgtgcaatacaccaaaccaaactcttacggcaattgaggcattgactatagcaagtatgaatagacatttagggcataatggaatattaaaaggccattgcactggttctgcagttttttgaaaaaagtttacagtttattatgtatactgggagacaatacttagcaaatgcaatcctcaaagtgcattttttcaccttttgtgatcattgaaagagacattaatcggcttccatactaagaaggcttccaatgaagcaggatggctacttctcacatgctcactctgtagattatgttccttctccttttcctttaccagatgtgcagtatgtgaagctccagctgtggtgatcgcagttcacagtcagacgatccagattccccattgtcctcagggatgggattctctgtggattggttattccttcatgatggtattttacactcttccttgcatttgtcatcatagctgactgtccattccatctacatttcttcccaatatgaggaatccctgtcatttgcataataagaagcttaaacttcaaacagcttctatccaagcactgtgttccccctcacacattttttgtaacatattttcataatctgcctattacttttttttgactacccttggtgtggatactattgtcttacctctgggcctgttccttcactagatttgaatttggccaagctcagcacacatctttggatattcactaagctattatggcacatgggtattgcggcacatttttccttgtcttttatagcatacaagtgcaggggcagaaggctcaggtcaagccctagcctcccctggttcctgcttggaagagtttcgttcagctcccttcatcgaatgtcatgggaggggtacctgtaactactatgccaactcctacagcttttggctggcaactgtagatgtgtcagacatgttcaggtaaagtgcttatagctttaattcaggtccaaagcttccttcagagatgctagggaagaaagagacaatttatggatggtttatcctcaacaaatgttaggaatttattggattgtgtactttattcttgcttgttcttctcatatacatgactcaggtcagaaaaacagacttgattattaatattaggtgagtttggtttgtgatagcttagtagtaatccttcaataatgaaacagagataaagaaaggttatgtgaccttcctaataagtcagcagctgttcaactagattgagaccaccccaggaattgaagttacagtctgtcttttccctctcagtccagtggtctcctttcccaggatattttaaagattctcatttaagggtttgaatgagcaagacatacgtaatgtatgtacctcaggatacttcattctgttgatttttttcagtttaaatttatttttatgtgttgcttttgggttatcactacttggtatttttcttatggtccttgttatctatcataacatcatcagttgcccagatttccctcatcctgtgaatattagaaaaatgtatgagagaaagagaaaaagatagaaaatgagagggaaacacaaatatacaaagataatagtggtggggagaatcgttacaaaatatctatgaccactaatggctcttaaaccatactagtcactgcattagatcatattgctgaaaagtaaaccattaagtcaccaagagagctacttaacacacaaaaaatgtttagttataaatttgaaccagtaacagaattgaaataccagaaaatgtggatctgattgtcttatttcttatttcccagtaaacctcagtcagaaacgctgaaagcaggagacttgaggacacgaattagccgatgtcaagtgtgcatgaagaggacataacattttgaagaattccttttgtgttttaaaatgtgatatatatatatataaaattcctaggatgcagtgtctcattgtccccaactttactactgctgccgtcaatggtgctactatatatgatcaagataacatgctgactagtaaccatgaagattcagatgtacctcagcaatgcgccagagcaaagtctctattatttttctactaaagaaataaggaagtgaatttactttttgggtccagaatgactttctccaagaattataagatgaaaattatatattttgcccagttactaaaatggtacattaaaaattcaattaagagaagagtcacattgagtaaaataaaagactgcagtttgtgggaagaattatttttcacggtgctactaatcctgctgtatcccgggtttttaatataaaggtgttaagcttattttgctttgtaagtaaagaatgtgtatattgtgaacagccttttagctcaaaatgttgagtcatttacatatgacatagcatgaatcactctttacagaaaatgtaggaaaccctagaatacagacagcaatattttatattcatgtttatcaaagtgagaggacttatattcctacatcaagttactactgagagtaaatttattttgagttttatcccgtaagttctgttttgattttttttaaaaaacaaacccttttagtcactttaatcagaattttaaatgttcatgttacataccaaattataatatctaatggagcaatttgtcttttgctatattctccaagattatctcttaagaccatatgccccctgttttaatgtttcttacatcttgtttttactcatttctgactggacaaagttcttccaaacaattctgagaaacaaaaacacacacgcagaattaacaattcttttccctgtgcttcttatgtaagaatcctcctgtggcctctgcttgtacagaactgggaaacaacacttggttagtctcttttaagttacaaaaagccaattgatgtttcttattctttttaaattttaaatattttgttataaatactcacaggataccttatttccctagctatcatctcctgacttaatgttttttaaacccaccaatataaatttaattaaagatatatgttgtaaggatggtctgttgtgtatctcttcagcctgtgtggaaaaaacccctgctcatttacagatagattaccaatctgcacatcaacaagtcatctcttcccagggaatcagtttctccacgctttgatcactctgttagtagatagaaaacatagtaatgtaaactttttccaatgaagaaaactacctattggaagacatttccaagataataaatttcttgacaacattgtgttaatggctaagaaaggaaacaactggcttctatttggggaagaattcattaataatgtttaaagcaggttagtgacctaatattcttaatgattaagaatgaacacgcatagttctctaaaatagtcaaggactggttaaaaataaaatattaaaaacttccatagtaaaatttgtgttacagctaaaagataaaacaaccaaaacaattttgagtattctaaatcctaatatggacctatgtaaaatctaaagcttagaatctctggtggtaaaacttaggatccaaacaatgataactatctaattattttattgattctggatagccaccaatcgcaaattttagctctattttttcatttagtcccatgcataaagtcagtaatgagtaattgtaactgaaaacaccatatcacagccccacagattcttctacatggtgtacactcaaaggtgccccttctgttatagtcgcaaacactaattccagagattttgctttttgtagctttccctctcatttatagctggttgaaagccttggcccaaaaagaacctcctttgtttgtttgtttgttttgttttgttttgttttgttttgttttgttttgagacagtctcctctgtcacccaggctggagtgcaatggcgtgatctcggctcactgcaacatccacctcctgggttcaaggcgattctcccacctcagcctccagactagctggaactacaggtgcataccaccacgcccggctaattttttgtatttttagtagagacggggtttcaccatgttgcccaggctggtcttgaactcctgaactcaagcgatctgcctgcctcggcctcccagagtgctgagattacaggtgtgagacaccacgcccatcccagaacctcctaatttttaaattgttgcatgtgcagctagtctatgtgtttcttaaatctcctaactattcctagccctgctttgttgtttgaagtacacaaattcattccaggacattaatattgttaaccctctcttgccatgaattattcaaagattaatctagctgctctactagttacctatggtgagttttttgtgttttgttttgttttgtttttgtttttgtttttttttgcttttttatcatctgtgaaatttccagaagtactatggtaagttttacagtcatacacaattaatagctttctcacattggcaggaaatgaatgaactattctgcttaatcagatagtttgactaccaaatatttatgtgtaccaaatgtggttttaccagttaatgaatctttcgtgattcagatgttacttaaggaccaaatcctagtattttatagctgtgtatgtgtgtgtgtgtgtgtgtgtgtgtgtgtgtgtgtgtgtgtgtacccacacacacgtgcacatgtatcttcagaaaaattgaggtctacatgaataacttccattatatatatattacgtaatatatatatacacacacacacatatggataagtgtatacacacacatgtgttgtgtaagaaagtagacattccaattatttttatagcttattggcctgatctttgctatgttggtgtcacactcattgcttccaaaggaggttgtattggacaccttgtgattgtatgatgttttttcccacccatccaaatttgaacaacactttttcattcttgtagtggcaataaggttctttgcctcaatgtcatgccaagccatcaaatgcttattcagaagttaatcacaagagg

SEQ ID NO: 749 - DNA, 30301 bp, Homo sapiens
ggggcctgggccagcagccctggggctcccaccagccaccagcagcactgagtctcctctgcaactttccctgtggacaaaggcagtttcctgggatggtctttccttcccgttccaccacttttatgggtttaagaaaaccactaacacaggacagcggtggataattccccttttccccgcgctgacgtttggaggcaccagggctcctcaaggtggactggggggctcctctccctgaacgcagggtcctgatgggggtgggggtgggggtgggggtggagggcaggcaggttccagaaacagccctgccctcccctgcctcccgggacagcttcctccaccaagcccacctcatgctccatcctcatcccctcttagccaggtcctgctggaagaggaggctcgggtccacccgcaggagtcagagaggccctgccagggacactgcacattcaaggccctctcctccatccttcttcctctccctcctcccaccctctccctcctcccaccccctctcccctcctcccattctctccctcctcccactctctcccttctcccaccctctcccttcccacacctggagactcagatccccccagggctgtggacgactggcacagtggggtaagtcctgctccccacagctgcttctgggatcccagactgggcccagagtccccatccacagaagggccggcaggcctgagaaaggacagccaggtcgccagggaggggatgtggctcgcccccttcttccctttctctggaagtgcatttacctccccccacacacaggcggggttgcagggcccttcccagccagaccctgcagtgcagctctctgggaggccccccagggcagtggtttcctggctctgtgcttcctaggatcctggaagccgactgggctggggttggggggtggagccccatgggagaaggatctcctgcaggaatggcctggatgggggcttgggggtggacatgtgccagagacacctgggtaacttcaggagagaggagggagggggagagaggagggagggggagagaggagggagggggagagaggagggagggggagagaggagggagggggagagggggggagagaggagggaggaggagaataggggatgggagagaggagggagacggtgaaggggagagtagggagccggagaggagaatgaggacaggggagaagagggagggggagatgaggaaagggggaggggagcaagtgtgagaggagggagggggaaaggagggaagggggagaggaggggacaggagagaggaagaagggggagaggagtgagtgtgagaggagggagggggagagaggggaaaagggggagaggagggagggggagaggagggaagggggagaggagtgagcatgagaggagggagggggagagaagtgagcgtgagaggagggagggggagaggggacaggagagaggagggagggagacaggagtgagcgtgagaggagggagggggagaggagtgagcatgagaggagggaggcggagaggaggggacaggagagaggagggagggggacaggagtgagcgtgagaggaaggagggggagaggagggaagagggagaggagtgagcatgagaggagggagagggagaggactgagcgtgagaggagggagggggagagaagagaaaagagggagcaaaggggacaggagagaggagggggggagcggagggagctcacccgctgtgggtggggcaggttgtggaaatcagccccatgacaacagtaagctcagccaggactgggattcaggatgttttattttcatgctttatgtggttttcatgttctccctgagacataagcatcacttacaatcagaaaagatccctgatgaaagtgcatgaaggaacacaaagcaggcgactgcacgtctatgaacacgctcacggtacggtgcacagagcaggcgacagcacgtctataaacacacttatagcacggtggccacggtggctcacgcctgtcatcccagcactttgggaggccgaggagggcggatcacctgaggtcaggagtttgagaccagcctggctaacatggcgaaaccctacctctactaaaaatacaaaaattagctgggcatggtggcatgtgcctgtagttccagctacttgggaggctgaggcaggagaatcacttgaacccgggaggcggaggttgcagtgagccgagattgtgccactgcactccagcctgggcgacagagcaagactccatctaaaaaaaagaaaaacgcttaagcagaaacacactgaagtattagctctgaatcccactcggtagtgaaactagatgttgctttatgattttaaaaaattcgctatgatgaacatgtatcttcttcataagagaaagagtcaagtttactctgagtcatcattgcagatttcctgtgaagcagaggcacctctgggccccacccaggcctgggaccgccctgagcctgagcccctcacacagtgcggccccagccctgcctcggagaagcccaggccaggatgaagcctgggaccgggggaggagtcggaccgcggccctggagctcaggatgctgcagcctggggtgtcggcgttattcccacgcatctccacagctcccgccgcacccaccccgcggacctgctggcggagccggtggtatactgtgaactgacttatgaaaccacctctgcaaggcaaaacaggccattggccactgggccccgtgaacctgtccctgggcgtccgcatctcttccatcttacagaccgtgtgtcagccacctgctgctgtgtgcctgtggtgggaccctcactgcagggaatgctgcattcttggtgtttgcttacacaacgtgttcctatttcctttcccaaatctgcaagcactccttgcagataaaacagctcagactgggagaggccaagagaacacggaggtcctgaagccccctgtgcttgagtcaggagcccagaggctggtgccacagctccaagcaggcagcaccaaacctcagcacccacagccacagtgtggatgacatcagtggcaggtaaattgactgtacagtaagtgtacaaggccaggcacggtggctcatgcctgtaatcccagcactttcggaggccgaggcaggaggaccacttgagtccaggagttcgagaccagcctgggcaacatcgtgagacccccatctctacaaaacatacaaaattagctgggtatggtggcacatgcctgtgatcccagctactcgggaggctgaggtggagggatcacctgaacccaggagactgaggctgcagtgagctgtgatgaggccactacgttccagcctggatgacagagtgagccccttagataataataataataataaggaggaggaggaggaggaggaggaggaaaagaaggagaagtactttacaacttctgtaacgtaggtgtggggaaaatattgaaggcaatccaaaaacagtcactgtggagttgtggaattaagtatcaattttaaaggttttttcaaatgtttctttaacatggtttttggtatgaacaatttgtgtacgttttaaaattataagacatttaggctggtgttaggcaagtctcagcagctccagctttgggaaagctcttctgggaccttctgtgggccagggatgcatctggccacatctggagcccacccccaggtgatatcagggacagcccctctctcctctctctgtctctctttctgtctctctgtctctgtctctctgtctctgtctctccgtctctgtctgtctctcctctctgtctctctctgtctctgtctctctgtctctgtctttgtctctctctgtctctcctctctctgtgtctctgtctctgtctctctctctgtctctctctgtctgtctctctgtctctctctgtctctgtctctctctgtctgtctctgtctctcctctgtctctctgtgtctgtctctctgtctctgtctttctgtctctctctcactgtctctgtctctctctgtctctctgtctctgtgtctctctgtctctgtctctcactgtctctctctctgtctctgtctctctgtctctctgtctctctgtgtctctctgtctctgtctctctgtctctgtctctcctctgtctctctgtgtctctctctgtctttctgtctctctgtctctctctgtctctgtctctctctctgtctctgtctctcctctgtctgtgtctctgtctgtctctctgtctctgtctctctgtctctctctcactgtctctctctgtctctctgtctctgtctctctgtctccacacacagcatatataacaactatattgtgagcaactttgtcttcccacggtacaaactgaaatatctttggcaaatacgtatccgactatactgtgaagaaatattgacgtgaaaaaagaacgcggagatctgataaagcaacaattcagctcacggcgaggtcctctgcaggaggcggttggtgggaagaggcgagtgagcctgcccgtgcgtcccgcatggagacgtctggattggaaactaccgaaagatgtttcaaggaactctccctgggtgacacgctggttttcagacgtttgattcagctgctgcagtttcctcctccctgacacgggaactgaactgcaggccgcggcgagccagccagggaaaccgccttctccctgggctcggagctgctgccggttctggagggagagaccccagcaaggaggtggtgactcatgggccgctcctccccgccccgccccgcccctcccctcccgccccgcccctcccctcccgcccctcccctctcctcccgcccctcccctcccctcccctctcctcccgccccgcccctcccctcccctcccgcccctcccctcccctcccgcccctctcgccccgcccctcccctccttgccctccgctctcactctggctgggagcagaaggcagcctcggtctctgggcggcggcggcggcccactctgccctggccgcgctgtgtggtgaccgcaggccccagacatgagggcggcccgtgctctgctgcccctgctgctgcaggcctgctggacagccgcgcaggatgagccggagaccccgagggccgtggccttccagggtgagtggtggcttggggtgcaggctccagaccccccgctctttgctgccggccagggccagatgcgcggggtcccctcccacgcgtggaactgcagactgggggcctggagcccctgaaccccactccccgctcggggcggctgcagcgcccagctctgccccaccgggccttggccggggcccctagaggctcagcattcagcattctcagcggggccggaccgcaggcagctcgggaggggctccctggcgagggggagctggtgcggggctgtctcggcgccccgtgaatccgtttgacccctcacctggcagtgagtccagacgcacggcccccccgacccccgttctagaagaagtcgtgcgctgctggttctgaatccagcgagaaaccttcccgtgaggtctcacttgtccggtcccgtgccggggacgccctgcccttcgggggaggttgtgaaggtttctgactcccctcgaggcacaggagcggtttggggtctctcactccaccccctccccaccgtccccaccgagggacgtcctgctgccttttcccgggagagcctctccgggcccggggctctgtgctgcaggcgctgggctggccgggagggcaggcccagcagagactcggggaatggggcgagagcttgaaggcccctctcctccatcttcggccagactgccccgtggacctgttctttgtgctggacacctctgagagcgtggccctgaggctgaagccctacggggccctcgtggacaaagtcaagtccttcaccaagcgcttcatcgacaacctgagggacaggtaggagggacgccccgtgaccttcctcctgtgcttctgggcctcttggagggaggggtgggggcccaggggaacacgggtgcgacggcctcaacctcctaaggttgggcgagcgttgccctgaccggggcccctcccggcgccctccagagtgaggccggggccctttccggcgccctccagagtgagctggtctgagcctctcccagcgccttccagagtgagctggtttgagaccctgctcgcgggggtggcacctgttcagcagggccgaggtgacagtgaggctgagatgtagggaagagaggctcccgcaggctgaccgagagggctcagcgcactggcccagacacgcagtcctgcctggtgcgcgggagcccctcactaaccacctggaccctggtttgttccgtgggcagtgagagcctctacctgggtcctggatcccacgttctgaaggtccccgactcgggagccaggaggggtgtcgctctgcagccccagggcccccaggcttggttctgggcttgggacacggcaccctctgctccacgttcctccatctgtgcgtgtggctgaggacagaccggggggagaggggagtcggtcctgtgggtgcacagggccgctgaggggggggcatgtagaacggggctcccccactgagacgggtcctggcagtggggacacagcttagccggcgtaggaacccccgtcctccttgaccctgctgactggccgctgggccggagcctcccgccaccagaaggggcacagtcagaggctgccggtaacagcagggtggaccttccagcccacaccgtgcccagcaggagccattggtaccaggaaccctgagcttagtggacatggccaggcccgtgcggcagtgtttgggggggggtctggctgtggatggcaccggggaggggcggccgcgtggcccagcgtcccccgagtcgcccttgttgcctttactcagtctccccatgactcagtttcccacctgtgaaatggggcggagtcatccccatgtcgctgccactggattcctgcaggcgccgtggtcactctgctgaatggatgggagggtgggtggggcagaggtgggcccaccccaggctggggcagagcagacccctgagagcctcaggctcaggtgctcagagggcagcgagggggctgctcagatccccggggtgcctccttcccccactgtcatgctgccccactgcaggcccaaggaccccaccccagcagggccacacactcagggctcctggtctgagggcctgagggatcggggcgcaggtcgcttgctggccacacccgcctgcacagccttccaggagggccggcctcagggccacagggcaagtccagctgtgtgtcagccacggccagggtggggcagcctgtccatctgggtgacgtcgcgccctgggacgggtagcgatggcgccaggggccgcccgcctcacgcccgccgtgcctgttcctggcaggtactaccgctgtgaccgaaacctggtgtggaacgcaggcgcgctgcactacagtgacgaggtggagatcatccaaggcctcacgcgcatgcctggcggccgcgacgcactcaaaagcagcgtggacgcggtcaagtactttgggaagggcacctacaccgactgcgctatcaagaaggggctggagcagctcctcgtggggtgagtggcccccagcctcctgcccacgccagttctcacgcgtggtacccagcctgggctggggttggcctggggtccctgtgcggcttcagctgcagcctccctgttctcttggaggctgcacggcctccctgacccactttgtgggcaggaaagagacggagacagacagagacagagagaaacagaaacagggagaaacagacacagagagagacagagacagagagagatagagacagagacagagagagacagagacaaagagtgacagagggaccaagacaggcagacagagacaaacagagacagagacagagacacagagagagacacagagagacagagacgggaacagagacaggcagacagagacagagagagacagagacagaaacagagacagagggacagagacaggcagagagagacagagagacagagacagagacagacaaacagagacagagagacagaaacagggacagagacagaaagagagagagacagagggaaacagagagagacagagacagatagaaaaagacagaggcagagagaagcagagacagagaaacaaagacagtcagagacagacagagacagagacagaaacagagacagagagacagagacagaggggcagagacaggcagacagagagacagagacagagacagcgaaacagagacagaaacatacagagacagagagacagagagaagcagagacagacagaggcagagagacagagagaagcagagacagggacagagacagagacagaaatagagagatagagacagagggacagagacagagagatagagacagagagggagacagagagatagaagcagagagagagagacaaagacagaggcagagagacagagagagaagcacagacagagacagacagagagacagggacagacagagacagagagaccggaaacagaggcagagagactgagagactgagagagacggggtggttttccccacagcatcaacaccaagcagggctaggatcactgaaacagactcatcagacccgaagcatgcgctttctcggggtttttctggactgaggggtttcctctcatcccagtgtccagctgtggggacgcaggggccgcaagccccggagtgtccagaggggaacgtggcctccccacacccagcccttcacgaggcctcaggatcccagtgggggtacccgaggctgccctgtccagccaggcggtgcggggggtttggggagagcctctccccgaggtcggtctcagagggccacatggccggtgtgggccggacattccctttccaatggttgtgcccacttccctccagagttggtgccaagctgggacctgggggacttggagtctcaggaagtcgtccgctgtctgcagggggtgcatgggggatgtggccacacacgtcagagtgcggccccctgtggaagccacagacagacacgactcccctaaatgagctcgcccttctggccgagatgctcagcgtccccagcaggctgcccgactgccctgcgatactgccctccttcctgctgctcccactttccctttcggggggttggatttggggcattcagggatcgccctgttgtttgctcatcacacccatttcctgcaagagccacggtgaccgagcagccttgagttgaggcagcttgtgggtagacgcggcgggcatctcggaggggcacgctccctgccaccctcagcctccactcactggtcaggggctttgcgccccagggcaccccaggaaccgagcctcctttggggtcatgggtgcctctcctgggagggcgtggattttccaaagcagtttagagaaatgagacccacaggcgttatttcccatggtgaggttcttttcagtaacccccaccgtatagccaggatcagcaaagagaggcggctcctcccggtgagacagggaccagcacctcccggacaggcttgggtctccctccagttcccccacctagtctcgaggtctcacgctgccctctcctgtccaggggctcccacctgaaggagaataagtacctgattgtggtgaccgacgggcaccccctggagggctacaaggaaccctgtggggggctggaggatgctgtgaacgaggccaagcacctgggcgtcaaagtcttctcggtggccatcacacccgaccacctggtaggcaccggccccccccggcagatgcccccaaccacagggagtggcggctgcaaggcccccggcagctgggaccgtcttttggtcctcgggagggtgtgggttctccagccggccacccttgcccctgagaggccagcccctcctgctgaggagcctggagcgccccagcccagcctcccctctggccctgtgggaagcggccccggccgtcaggggtcccagccctgctcagcccaccctgaacactgcccccaggagccgcgtctgagcatcatcgccacggaccacacgtaccggcgcaacttcacggcggctgactggggccagagccgcgacgcagaggaggccatcagccagaccatcgacaccatcgtggacatgatcgtgaggcccctgcccaggagacggggaggcccgcggcggccgcaggtggaaagtaattctgcgtttccatttctctttccagaaaaataacgtggagcaagtggtaagagccctccccaccacccccagccgtgagtctgcacacgtccacccacacgtccacctgtgtgttcaggacgcatgtccctatgcatatccgcccatgtgcccgggacacatgtcccctgcgtgtctgcccgtgtgcccgggatgtgtgtccccctgcgtgtccacctgtgtgtctgcccatgtgcctgggacatgtgtccgcctgtgcgtccatccgtgtgtccgtctgcccatgtgcctgggtcgcatgtcaccctgtgtcccagccgtatgtccgtggctttcccactgactcgtctccatgctttccccccacagtgctgctccttcgaatgccaggtgagtgtgccccccgacccctgaccccgcgccctgcaccctgggaacctgagtctggggtcctggctgaccgtcccctctgccttgcagcctgcaagaggacctccggggctccggggcgaccccggctttgaggtgagtggtgactcctgctcctcccatgtgttgtggggcctgggagtgggggtggcaggaccaaagcctcctgggcacccaagtccaccatgaggatccagaggggacggcgggggtccagatggaggggacggcgggggtccagatggaggggacggcgggagtccagatggaggggatggcggggtccagatggaggggacggcggggtccagatggaggggacggcggggtccagatggaggggatggcggggtccagatggaggggacggcggggtccagatggaggggacggcggggtccagatggaggggacgtcggggctccagatggaggggacggcgggagtccagatggaggggacggcggggtccagatggaggggacggcggggtccagatggaggggacggcggggtccagatggaggggacgtcggggctccagatggaggggacggcgggagtccagatggaggggacggcgtggtccagatggaggggacggcggggtccagatggaggggacgtcggggctccagatggaggggacggcgggggtccagatggaggggacggcggggtccagatggaggggacggcggggtccagatggaggggacggcggggtccagatggaggggacggcggggtccagatggaggggacggcggggtccagatggaggggacggcgggagtccagatggaggggacggcgtggtccagatggaggggacggcggggtccagatggaggggacgtcggggctccagatggaggggacggcggggtccagatggaggggatgtcggggtccagatggaagggacggcggggtccagcaggcaggctccggccgtgcagggtgtggactgtcccgggggcgctgggggcttctgagggtgtctctgtccgccctgccctcagccgcactctgttcagaaggacctttctggaggtaggagggtgagaatgtgggtcccctgcttctgtgtggctcacataggatgaccttaaacgttagaattagctgctgataattaaaacttgccatgaggctgctcatggacctcagatttctggcttctcctaaaaaccatcaaacccagcagctgtgggcccgagtcccatggccatttcctgggggtcgagctgtgaccctggggggcttctgtgctgcacgtccctcccacctgtgcctgggggtcagcaaagccgagcagacaggaacgaaggcagggagtggggggagctggcgtgcgggttggagctcccagacccaggctgaccagatgtgatggggaaggtgctttaaagcccttgatccctgaaggctggatgaagcgtctttttaaaaacctgtttcgtgagccagctttttagaaagaaacggggctgccccaaccttgacctgttttgtgttccagggagaacgaggcaagccggggctcccaggagagaagggagaagccggagatcctgtgagtgcctgactgtggggtgggggccctaagaagctggaggcggggaacgactaggcctcggaaacttccggaagagtggctgggttctgagtgccaaagtcacactgcctgttccttgtgggtgggagcagacctggaggggccacagcccagccatccttccacacagccccccaggcagcccgtaagcccccctgccagggaggggctgggtggggaggtggcccagggtgctcaggccggcaccgtccggggcccctgccgtggctccttggcccaaatcctatccatagacttccctcccccagctccaccttggagggcctcggcaccatgggccccgtgcagcagggcccctctctcggcctgaccaggcctgggctggagggaggggtgtggggctgggtgggactggcccctgcccctgctcctccgggggtgtctcaccatctcctcctgtgttccagggaagacccggggacctcggacctgttgggtaccagggaatgaaggtacgtgccccccctttcctggcccgagcccggtggtgccctcagccttgcacagcactaacaagccttcctcttcctcttcttccgctgggtgtgtagggagaaaaagggagccgtggggagaaggtgagtgaggctcgacctcggagctggtctctccaggcgcagatgtgccatcctggacgagggtgtccccggggatgaggacagtgtccctgacaggagaccacgtgtcctgcagacccgctccaccgcccctcgccgtcccctccatctggaaggacaaggacagccacccaggcacccagcaaaggcgcctgtgtcactttcaccccaccccagagcaggggtcccccgggcggttaccctctgcggagccgggggtcccccgggcggttaccctctgcggagccgggggtcccccgggcggttaccctctgcagagcggcccctccccatcactgtcagtccccatgattctcagcagtgatgttgtcccctcgggttgggggcacccaagcccctgcctcgcgtgggcctaagccaggcttgccctgccctccccaccccaaataccccctcacacccgcttcctgtctccgcagggctccaggggacccaagggctacaaggtgagcgtgggctgctgggaggggggagttctgcccccacggcagcatgtctgacctgcatctgactcctgccttcgttttcccgcctcacagggagagaagggcaagcgtggcatcgacggggtggacggcgtgaaggtgactggggggagataggatggacggggagggacgaggaggaatggggcgagatggggagggacggagtggacggcgtgaaggtgacccggggagggatggggtggacagtgtgaaggtgaccaggggaaggacggggagggacggggagggatggggtgaggtgatcccggcaggagggacagggaggagtggggtggacggtgtgaaggtgaccccaggggggtgtctgctaggcagggctttccagggagggtgtggagggcatggagggcaccaagtctgacagttgattggcctcagtttacccacttggccgtcagattttctagttttcttcctctttccagggggagatggggtacccaggcctgccaggctgcaagggctcgcccgggtttgacgtaagtcacttcctctcactgatactttaaaactagcgctgtcagcagcacctcgtgtggaccgttttgacttctgtctgggcggtctggggctgctgccagaggccgcggtggcctctgccggtggtgtcatgctgccctcttttctccagggcattcaaggaccccctggccccaagggagaccccggtgcctttggactgaaaggagaaaaggtgagtgacttgcggcccctggaggaccagggccttcacggttggccaagcgctgaattggaaacctctcctggaagcaagtcctggtccgagcatgtcggccacccgtgcggcctcagaggggaggagctggtggaggctggaggcaggcagaggagcagcggggacagtgcccaccgtggggacagtggccgtggcgctcccgcccagagccttccctgcagcccgagggccttcaggcctccgccattctgtcccccgcacctgccgctcgctcggcacagatgggaccccaccgcgtcactcctagcctgcgagccgcagcccagaatggctctcagaactgagaatgggctgggtggcactgagggtggcgagtgggcgggagggtggtgagcgggggcgggaggagggtggtgagcgggtgggagggcgagtgggcagcgggagggcgggagcacgaggcgggagaaggagctttttcgtctgacagctgagtctgccgttgctggtgttttctctggagtttctttgttgaagctgaagtgttggggaagacaaaggcgaatgctgaccccaccccaaacattcccagacgagctcctagaacccagcagacggtttccaaatctcatcttcaagttcccagattaccctccaggccctagatttgagtttgccaatttgccagcctggcaaagctgtgccttctctaatgggaaccaaatcctgccccttagacaagatggcccttggctgggcctcacagggaacaaggttggagcattccaggaggtctttgtgcagggttgtggatggctgagggtgctggggggtctgggctcagacagtgttggtcagagggagtggcctgaagtatgggtgagaggccctggatgtggcctctgatggctgcacccctggtgcacacccctgccagcgtgtgtgactcccccggtcttccccagggcgagcctggagctgacggggaggcggggagaccagggagctcgggaccatctggagacgaggtgaggagcttcacagcccccacacatgccaggtatgggcccagggagggtcaaggagatggagcgaccattcaacccttgttccccacagggccagccgggagagcctgggccccccggagagaaaggagaggcgggcgacgaggtgagtgagggctcctgacaccttcctggggaagtgcatggcctcagcttctgatcctctttgctcggggtctactccacgtccctgagaccaaatgcagtgtgtccaccagactaacgccggcgtctgtttctcttcatcccaggggaacccaggacctgacggtgcccccggggagcgggtgagtggggcaggggcagcctgcgctgttggcctcaccatgtagctgtggacgtggcctctgcggcccagtctggccctcccagcactgagagccatggcctcctgcccaagacaaatgggtttcttcacccacacgtccaggatgcctcttcccacagtctcagagcgggtgggacctggggaaccaggagattccggcctctgcaaccgtggggcatgcggtggaggggtggcccctcccaggggtcctgctgggggagtcagtccaggccaggcctcaagccccaccccagctgggtgtgagttccagcagctgaggcttctcccctccatgtctctccactcagggtggccctggagagagaggaccacgggggaccccaggcacgcggggaccaagaggagaccctgtgagtcacagttcctggagctgggaaccaccccaggaaggggcaggcggaggctggggctgggtcaggcctccagagccacaggacacatcatgaagcccctgtggcccctcaacgtggccagcccatccccacgccgtcagggagggcagcccctgaagccggcgcccagccatgtgcctgatgctgggacctgtttcatgtgaaggcgttgcccgtggacccggtgcccactttcccaccaggcggcttccacgtttctgcatccgagcttgggttcttctttggaataattttccttagttaaaattcccagcgtgaggaagttgggtcagtaccccagacgggaagctaggcctgcagggcgcctgcctgggaaggcttgacatggaaaactcaccccagagccgagatgccggcggcctcagaggccaccccccaccttcagctccgtggaccgtgggcctcgctaggccaccccacagcccagcctcagggtgcagaagcacagggcccttctctgtccctgtgacttgctgggaaatctgtgctggatgtggggcggggcagctggcagactccgggcgtctcagtcccatccggctcagggagagccagggcctggcgggcagagtgaaggggagagaatgccctagtgtgcccagccgagctgccaggcctcagaggcagcgcccccgggtgcccccttgtccgagaatcaagacatgcgactgtcgtgtgctgtgacagacaggcggggctccagcagggccagagagctgagccggggccagagtcgccgccaccgagggatttggctccccagtggggggtgggggatttctgacctcctccctgggagctccccagaagcgcacagcccccgtggaggggtcggggggacgtcaaagcagggatcgtgtgacttagtgactcagactgccttctaggcccactcctctgagatcaggatatgagactgacagccaggcagagcccagaggaagggccagccacgcagctccagcttcccggcgggccacaagtccatggctacaaacacttgccgggtccacggagcttgctggagaagcagggatgcacgcagggacgcctctggggccccaggaggagctgccggcctcctgaatgaagatagccatagccagccacgccgatggccacgcacgtgggccgaggaaacgcttggcgaggccaggaaggggctgtgcggggagggaaggccggaacagcccagtgaccacctggacagcatgctgtggctcccagcgtgcccgggcagccatcctccccaaggatggcccagctccacactcacggctcgtttctcttcagggtgaagctggcccgcagggtgatcagggaagagaaggccccgttggtgtccctggagacccggtaggaagcgctgtggggttggggggcgttggccaatttgggttttgggggtagaagtgctccagcagctcacgcactgggggtctgttcatttccgtttgagggcctctgtgtttccgtagatctcgggggtgtccctgcgtgggagccggctgcagggggtgaggcgcggcctgggccgggctggtgtggattgttgagagcaggcccagcgcccgggggcctgacgctgagacgctcagcccaggtggagaagcgctgtctgggggcccatccggggcaagggtgcctcacagtgaggaagaggtgttggagcccctgggagacactgggagcttggtcagcatctgtttttctgggtcaggagccaggcatgactgtggctggaggtcaactggggagtgtgaggctatggaggtttccagaatcccagggtgtcaggatgaaaatgcactttcatctcattctaaattcccttctccgagcctctggaatcgctgtgcacgccgcacggctttctgtctcttcccccattctgatgactgccatgatggtggctccagtgtggtgttgcccgcaggctgggctgggccgttgcatcctcccggagctcacctgccccacggggacaggaaggcctccacacggtcacgcccggagacagcaagtctgtgctcccgagcttgtctgcttctgtggacaaatcgaccttacggctccatgtgcgcagctgcccacacaccgagcacaaggccagaccctgggcacggcagctgtctcagacgtccagcaagatggggcctcagacccagggagatgggagaggccgtcccagtgcaagtcacatttgtatttctgtgcacgaggtgaaatcgtgcttttgtggtgccaacgggtgttacacagctgttaaaaatacctgtgtcatagatgaggaccagggcagggcttggcaggcggggtctgggccgttcgtccacctggtcctgcgtgccgctcacggcaggggcagaaagggctcccgacaccttcctggggaagtgcacggcctcagtctctgatcctctttgctctttgagctcccggggctccagccctgaggatgatctgacctcccatgtggtcacccaggacagggccaggtgcagggcacagtgcgtggaagaggccatgcagccagtggcagattgtggggaggggacggcccagggccacgttccaggcttgggaggctgctccagaccttggtagctgaaagtctcagtgggaatgagcgttcagaggccaggacttgctcggagaattctaaccacaccctgcctgttttatatgttcagttttcaaagtaatcaatagccactataagaaaaaaacaaagccactttcaaagggttgtggtaagaggcagtcctgtgagcaggccggctgcagggcctccagggctgtggggcaggctgcacaggggctggtgggtcccatgcctgggggtctgggaatagtctctaggctgctgtcctggaggaggtttcccccaacgcctgagaccagggcaccatgtgacccatgactcacagttgcctggctgaggcaggcacttgttcacctggagcctccctggggcctttcggggcccgggggtgtggataggtggctttggagccacatttgtccatcgggacgttgggctcccagctggccttccgggctttccctgctcccagaacctccctgctcagcccttgccagccttacccctcccctccaccctgcccagcatggggctctccctgtgtggatgccagaagcagttgggccctcagggctggtcccaggaggtgcccccagtgaggtgctctgcagaaactgcccagtctggcctcctgctgtctgtggcacagtctgactgtgtgtggtgaggtccaggccttctgcctcccacttacctggcccagggcacagagacctcctttccatccttcctcctggcccccttttcgtgttcccaaggcaggatctcagggtaccagactaacccctgttgaaccccaagtttggtgagcttctggacctccttgaggcccgtgtgcaaagtccccagtcaagtgtgcagtcctgactgctggggcgttgaccacgaagggtgcaggagcttcacagccaggcctgggtgcttgcacagtcggggtagagagagcaatacactagatgcctcctgtctgcctggtggaggccacggggtcaggatggtgaatgggccaagtctggtagtggggaagttgtaaacatttgaaccaccggacaggcctcatcgggaagcatcagcctaaccacaggccagggacaggcgtctgagcaggcacaggccagggacaggcgtccgaccaggctcatggctggggccaggtgggccaggtgggccaggtgggccgggcgatgtgtacacggctcccttcttggctcagctgggcgcgctgggaagtgcttggggtgcctgggctagactccgaagggcagggactcgccgctggagttgtccacggagcaggccctcaaaggtgggagctggggccagctctggaaatagacccccacagggtcctcatgagatgtgggggacccaaggaagtccagcaggcagcctcaggtgcaggtgggggcagggtggtgtccaggctcagcccacagagggtcctgcggttgggggtgggctaaggggaccaggccaggcccaaaggggaccatgagggagggcagtctggggccactctgataggagaaggggcaggtggtctgcggcctggggacctgtagcctcacccctccgtggggacctgaggcaccagccgggcactcaccgaagtcatctgggacaggcttcacccttccgtgggggcctgaggcaccagccgggcgcccaccaaagtcatctgggagaggcttcacccctccgtgggggcctgaggcaccagctgggcgcccaccgaagggcttcaacacttgtgcccaggcccttcgtgcaggcccttcgtcagacccaagagtgggcctggctctccccctgcactgatgggactggggccagagcctgggggccctgatgcctcttggtctgagaccctcagcttagggtcagggagggctcaggctgggtgaggcctgtggtccaacgtgccatatccatctctctacagggcgaggctggccctatcggacctaaaggctaccgaggcgatgagggtcccccagggtccgaggtgagtcccactccccacccacacccgcccacccaggggggcctgaggatccagaacccactgtctgcccagtgctggccccgtgccctctgaggactctatggccctgggtgtcctggctcccgatgggacctctcccggccccaggagggccctgcttccctccaaggtcaccatgctaagcctgctcccctcacgcctcctcttcctcctcagggtgccagaggagccccaggacctgccggaccccctggagacccggggctgatgggtgaaagggtgagtgtccaacagctcgggccctagggcggaggcctggccgccagaggccctgggaagccccagccccgcactgtggagctgcctggggtccctgaccgggccgggagtgcccgcagcatcactggctcctggccacagtcggcacctgagccagaggccgcctcggcagggcccctcctgccccgagatccgggtcccagggtccacggggaccagcagggtggccccaggggagggagccggcttctgggctgacggaggggccctgcgggtgaggtgctcccgggcctgtgccagccagtgggtatcccaggccaggccgattcgcacggtgacggctactctgctcccccagggagaagacggccccgctggaaatggcaccgagggcttccccggcttccccgtaagtgtccggaggctgagcccacaggaacatgcccaagctgcctgcggcgccctctttagtggactgggcactcttgggtgggcgggctggccccaggaccgccggctggcccaggaattccatggccgggattctgtcagctcaggcccttccgctgtgcgcccctcacagcctcccctctcaaatcagaacccggtatcactgccctgcttttccatgacaggggtatccgggcaacaggggcgctcccgggataaacgtgagtacgccccctcctccatctggctgtgggcacacaaacattcacagtcacagggacacgcacgtgtgaacacacatgtgcacacaggctcccgagcaaacacacggggtacacaggcacccacggctgccccactgtctgtggccacagccccagttggcatcggctcctgcaggccctgcgaggctcccactgtggtgtggcctgtgggtctcctcacggccctgactgcccggtgaccgatctcccctcggtgcgcagggcaggcccagccccagaggccgccccacggctctctaggccactccgggacccagtttctccagcccaggaaatgtgtgtggtgggggaagggaagagaagagtgcctctcttatctttatttttttccttttaaaatttccacttcctaaaaacaaaataaaacccttgttaaccaagtgctctcccgtcactgcagggcacgaagggctaccccggcctcaagggggacgagggagaagccggggaccccggagacgatgtaagtgtggatgggaggcagggccagccccaagtccacctgagccagagggctgggcccttgaagggcagtggaccaggacccgcttggggaggcctcatgggccccggctgctggatgctctgtggacggggccagcgcgcagatgcccgggtggtgcacggtctgttgacacaacgctgttcccttctagaacaacgacattgcaccccgaggagtcaaaggagcaaaggggtaccggggtcccgagggcccccaggtgggtggatgtggctgggtgaggccacggtgggctgtgcctgggacgccggatgctggggctggggaatgctggaagaggctgggagagtgggaggcggcgggagggaattttggggagcacgtcatctgggaggccctgggggtgggaggtgccggtcaccagggccaggtggtggccagggcagcagagccgagcccagggacacagcgggtcctcagggtggggcccacctgggatggccgcctggaccaccagtgtgcgaagccccagctgccctcacagcaccgtcactggaggacgaggggctgggtagggagggaccgggcaggggtgggcttgatgaggggcagggccctgggggtgggggctgtctcagctcaggaagcacagtgggctcctcaccctcagagctcctctactccgtttctcggacagggacccccaggacaccaaggaccgcctgggccggacgtaagtggggctctgtgaacattgctgggggcgaccactgtagcttccatcccttggggtgtgggtcctgtccatgggtgctcctgtagacgctgctcacgggggggtgggttgtggacaaagagctggtgccaggccctagggacccgtgacggccatgggaggacccgtgaggatcatagggggatgtgtgaggaccatagaggggacatgtgaggatcatgggggacatgtgaggatcatgggggggacgtgtgaggatcatgggaggacgtgaggatcatggagggggacatgtgaggatcatgggggacccgtgaggatcatgggggacccgtgtgaggatcatggggggggacgtgtgaggatcatggggggacctgtacccatgaggaccatgaggggacccgtgacggccacggggagacccatgactgcgctgtttctatgaccacgtcaggggtccagcccagtagcaggggtgtagtgggcagagccgggcacacctgcaaagaacctcctgcccaaaccccgccctgtgggggccccagggagggtgacctggagatccagcagcccacagtccccgctgggaggggctgtctatggccccagtaccctcgtctctccctccccaggaatgcgagattttggacatcatcatgaaaatgtgctgtgagtatctctgagaagccgtcctcgttagggagagcagggccgccagcctggcctgttccactcctagaagggtgtctccactgttgggggcctgggtctctgggtacatccttgaggaggctcctcagccagcccctaccggcctccaaagccctcccaggcccccgggtccccgcacaggctgagagtccccggtgcggtgcagagctgccacgtggggagggcggccggggaggcggggaggcggggcaggaggccggggaaggggggaggccggggaaggagggcggccggggaggcggggaggctgccccaagagtaaaagcctttctgacgtgcgcaggacgcggccctgactggtctaactgactctttctcttctcctcagcttgctgtggtgagacccaggctctagctcctgagagaatggatcccgggggtcggggagcgaggcctgggtcccacacatgtcacaggacagcacatggcactctggtccccgcccgcagctccctgcacctgcccgccccctctggggcctgctccaagccagcagggttcccgggtgttgggctgggccccgccctctttcacccataactgaaataaccaggagcaggcttgggggggtccctgctccatcattctggcccacaggccccaccctagcctggctgagcaacgccagccctgaccagccgccggacagagcagcctttacggggccatgggagggggtgggcttttctggggctgagacggggggaccccaacgtgtcaggtgaggatgtggcagccaaggaggggccagggcggtggaggggaggggccagggcactggaggggaggggcgtgctctgctgacaccgcccccgcctgcagaatgcaagtgcggccccatcgacctcctgttcgtgctggacagctcagagagcattggcctgcagaacttcgagattgccaaggacttcgtcgtcaaggtcatcgaccggctgagccgggacgagctggtcaaggtgaggcctcgccccgcccggctttctcaagcccaggtgcaccccgaccctgccggccgcccctgcccgcgccagacctcagcctcccgaggccaccgctgcatccctgtgacttccctactcatgacaaggatgccaggcacgcgccagcccgtccaggcctccagctccacctggcgaggctggcccattgtacacaggcgccccagatgagggagggtctccccctctccttgaagggcggtagtctggggtcctgagtgctgggtgtgggcttgtccctcgtggacagaacccaggagggcttcatccaccaaggaagattgctttgcagggtacccaggtcccgggggctgtgccaccctctgggcacccggagccaatcgcagggtacccaggtcccgggggctgtgccaccctctgtgcacccagagccaatcgcaggggacccaggtcctgaggtcctgggggccatgccaccctctgggcacccgcagccaatagagtcacccttgggaagcttatgcggacctggggcagcactcgcgtcctgaccccggtgccggtcccacagttcgagccagggcagtcgtacgcgggtgtggtgcagtacagccacagccagatgcaggagcacgtgagcctgcgcagccccagcatccggaacgtgcaggagctcaaggagtgagtgccccacgcggccaggaccctcccacccctcgccccgaccgctgttcccacggcaggtcggccctgacccctgatcccaggtgggctcggccccgcggcaggcctggccccaaccggcccttcctgccctttgctatgcagagccatcaagagcctgcagtggatggcgggcggcaccttcacgggggaggccctgcagtacacgcgggaccagctgctgccgcccagcccgaacaaccgcatcgccctggtcatcactgacgggcgctcagacactcagagggacaccacaccgctcaacgtgctctgcagccccggcatccaggtggggtggccacccccaggctgcacctgccccgcctagggcgccccgccagccagggtggccttgtccccagaaagacgagggcagagcaggctgcgccacaccgatactgtctgtccccacaggtggtctccgtgggcatcaaagacgtgtttgacttcatcccaggctcagaccagctcaatgtcatttcttgccaaggcctggcaccatcccagggccggcccggcctctcgctggtcaaggagaactatgcagagctgctggaggatgccttcctgaagaatgtcaccgcccagatctgcataggtgcgcatggggccacccgggcagtcccagatctgcgtaggtgcgcgcggggccgcccgggcagtcccagatctgcgtaggtgcacgcggggccgcccgggcagtcccagatctgcgtaggtgcacgcggggccgcccagggccgtcccagatctgtgtaggtgcgcgcaggcgcccagggctgtcccagaggcctcctcccagctcactgttacctccaggggcacggccaccctgtaggtgcgcacggggccgcctggggctgtcccacaggcatcctcctcccggctcgctgtgacttccgggggcacggccacccctgtgctcggccgggaggtcctgtgacatctccttgcggggttataggtggagcagtgggctcacactgcacggcttttctcttttacagacaagaagtgtccagattacacctgccccagtgagtacctcggcggccgggacacgtggggaggagggcaccgtggttggggcgagggctctgagaggacggggctctgggaggagggcctggcggtcacgagagtaggtgcatggctcactccggtggctgagcaccaccgtgccgtgccctctctggggagcttagacgctctctggccggcccactgcggctgcatcaccagggcctcatgctaacggctgcccaccccgccccgcagtcacgttctcctccccggctgacatcaccatcctgctggacggctccgccagcgtgggcagccacaactttgacaccaccaagcgcttcgccaagcgcctggccgagcgcttcctcacagcgggcaggacggaccccgcccacgacgtgcgggtggcggtggtgcagtacagcggcacgggccagcagcgcccagagcgggcgtcgctgcagttcctgcagaactacacggccctggccagtgccgtcgatgccatggactttatcaacgacgccaccgacgtcaacgatgccctgggctatgtgacccgcttctaccgcgaggcctcgtccggcgctgccaagaagaggctgctgctcttctcagatggcaactcgcagggcgccacgcccgctgccatcgagaaggccgtgcaggaagcccagcgggcaggcatcgagatcttcgtggtggtcgtgggccgccaggtgaatgagccccacatccgcgtcctggtcaccggcaagacggccgagtacgacgtggcctacggcgagagccacctgttccgtgtccccagctaccaggccctgctccgcggtgtcttccaccagacagtctccaggaaggtggcgctgggctagcccaccctgcacgccggcaccaaaccctgtcctcccacccctccccactcatcactaaacagagtaaaatgtgatgcgaattttcccgaccaacctgattcgctagattttttttaaggaaaagcttggaaagccaggacacaacgctgctgcctgctttgtgcagggtcctccggggctcagccctgagttggcatcacctgcgcagggccctctggggctcagccctgagctagtgtcacctgcacagggccctctgaggctcagccctgagctggcgtcacctgtgcagggccctctggggctcagccctgagctggcctcacctgggttccccaccccgggctctcctgccctgccctcctgcccgccctccctcctgcctgcgcagctccttccctaggcacctctgtgctgcatcccaccagcctgagcaagacgccctctcggggcctgtgccgcactagcctccctctcctctgtccccatagctggtttttcccaccaatcctcacctaacagttactttacaattaaactcaaagcaagctcttctcctcagcttggggcagccattggcctctgtctcgttttgggaaaccaaggtcaggaggccgttgcagacataaatctcggcgactcggccccgtctcctgagggtcctgctggtgaccggcctggaccttggccctacagccctggaggccgctgctgaccagcactgaccccgacctcagagagtactcgcaggggcgctggctgcactcaagaccctcgagattaacggtgctaaccccgtctgctcctccctcccgcagagactggggcctggactggacatgagagccccttggtgccacagagggctgtgtcttactagaaacaacgcaaacctctccttcctcagaatagtgatgtgttcgacgttttatcaaaggccccctttctatgttcatgttagttttgctccttctgtgtttttttctgaaccatatccatgttgctgacttttccaaataaaggttttcactcctctccctgtggttatcttccccacaaagtaaaatcctgccgtgtgccccaaaggagcagtcacaggaggttggggggcgtgtgcgtgcgtgctcactcccaacccccatcaccaccagtcccaggccagaaccagggctgcccttggctacagctgtccatccatgccccttatctgcgtctgcgtcggtgacatggagaccatgctgcacctgtggacagagaggagctgagaaggcaacaccctgggctttggggtcgggagcagatcaggcctcagtgggctggggccggccacatccaccgaggtcaaccacagaggccggccacaggttctaggcttggtactgaaatacccctgggagctcggaaggggagttgagatactgcagggcccataggaagaagtcttgggaggctccacctttggggcagaggaagaagtcttgggaggctccacctttggggcagagcaagaagagggcggagggcagaggcagcgagggctcatcctcaaaagaaagaagttagtggcccctgaatcccagaatccggggtgcacggctgttctgggggccgctaggggactaagaggatcggccgagggctgggctggaggagggcagcagggatgggcggcgagggtgagggtggggcttcctgaaggccttcacctgcggggaccccggcgagcccctcaggtgccacaggcagggacacgcctcgctcgatgcgtcacaccatgtggccaccagagctgcgggaaaatgctggggaccctgcatttccgtttcaggtggcgaacaagcgcccctcacagaactgcaggtagagacgggcccggggcagacgcagtgaggcggtgggcggggcccggggcagatgcagtgaggcggtgggcggggcccggggcagaggcagcgagcggtgggcggggcccggggcagacgcagtgaggcggtgggcggggcccggggcagaggcagcgggtggtggccggggcccggggcagacgcagtgaggcggtgggcggggcccggggtagtcgcagtaggtggtgggcggggcccggggcagacgcagtgaggtggtgggcggggcccggggcagacgcagtgaggcggtgggaggggcccggggcagacgcagtgaggcggtgggcggggcccgggtcagaggcaacgggtggtgggcggggcccggggcagacgcagtgaggcggtgggcggggcccggggcagatgcagtgaggcggtgggcggggcccggggcagatgcagtgaggcggtgggaggggcccggggcagacgcagtgaggcggtgggcggggcccggggcagacgcagtgaggcggtgggcggggcccggggcagacgcagtgaggcagttgccagcctctctcagctgcctcatgggattcgcactgcagctgcggccctggcgcgacaagggctggacttggccagcgggacggtccctcacggcgctgaggcccacactctgcgtggagcctccccgtgcccaggctaccctgcaaggtcctcggagaggcttcctccagccccagcccccacacagctccggcccaggcccgctcttccccatcccagttgctttgcgctgtatacggccaggtgaccccgagccggccctgagccctcgtcccggcttcctcccctgtaagctgggtgaaggactccatggcacccacctgagagggttgtggcgaggcccaggcccctcgtgcccacacggccggcggcccatgcctggcaggggctgggaggaggctggggcgaccagaggggagcggcctgtcctggaggaggcccagggaccctggtgagagggtctctcccaagtgctctctatgggacccccttcctctgcgcccgtccttcacggacctctccgggtcacccctgggctgcacactgggttcaggggggccttgaggtggggcccctgttcccaagtcccggcggggtttctcctgaacctcaa

SEQ ID NO: 750 - DNA, 41731 bp, Homo sapiens
cgcagcctgctgcacccaagcactctgagaaaaggagcaatcacccaacttcagtctgaaaatgagaatgttgagaagggcatgatgaggggaagcagaccagagcccaccggcaagggtagaacgtcagccccgccctagtgggacagacaagagagaagcctcctcacaccaggaggcagtatagccggagccttccctccagggctctcaggagagcctgtgctggttcatgaaaaagtgaggcctctgggctttgctgctgcagagtgaggtcagagcccacaggccccacagatcatcctgcctgacaagcacaggaggcaccactgcttgaattcagagggcagctccgagggtcctaggtcccctgtgaatctccacagaatcctgggacctcagagcctgcatcagttggtcccccatgcagggacttagtgactctgcagccccagtcagggcctgctctgtgccaggcattgctctgcagacccaaagggactccaggccagtcctcatcctcagggcccacagtgtaacacagaggccgtgccgcaggctctgctcctctgccagcaagctgtgcagtcttgggcaggttacttcagtgctctggtctcagcttcctctgcaagtggtggcagggctgtgctggaggcatgagaggggtgtgggagctgcaggctctggcaggtggcacgctggggttcttggagaggggtgtgtggctgccaggggactactgctgtcattgccatctgcagagacaaacagaaacccaacacggcagccatcactggggccccttcatgggagggatagggtggaaattgcaggtcccagcaaggcctcaaagcaagtgcccagcctcccctgatcagtccaacctgaagccaggtcctggtgtgcacagagatgcacggctgggctgccccacctgcttgggccacaggaagcatttctctaaaggtgagcagcttcctctgcaggtgacacggcctccacccaaacccagaggctctggctctcccactgcggcttgccgcagccccacacttgcctgctcccacactgacacctccaacaccacaggggctgctgggtcacgtggcccagatggcagggctgctcagacagtcattttctgctcctggccgcctcgaagctggcagcctccatgtcagccaagccgtgggtcagagcagtgcccccaggaattaaatatgttgccttcagaacccaaaaaggcctgtcaggccctgtgcttcctcctttgaagtaggggatgcaagatgtagcaatttctcttttactttagaggatgtcctggtatgaacctgatcactggtgccctaaaaacttccatgaagttaggtccctgaatcctcggagttcacctcccacccacagatgcaaatgtgtctcataaggcctctagctcatgaccctcctgttcctcctcctgcccattatgtcgtcactgtaatggatcagtgtggtgtccggtgcactgctcaggtgcccagatcttttcaggcaatattaggacagaggacagagttagcgtggccctgcactaaactgggaatgagtattgttgttcctcccatgtaaatgcaaactgtttccgatcctcttttctaattggaatagaaaagaatgcaatggccaatcactggcctcattaatctgctacgatgatacgtctgacacagcagatgcaactggagctactaccgggttcaggctaagtggtctggcgtcactttctaggatccatcagtctttgcaatgaccaggccagagaattagacacgacagtccaccaccctcgcctccgtgaggcctttaacggtggtgccatcctcccaggatgcaacgtggtttgtgatttactctcttggccatggaaaggggacttccccactatgatgtctgtcaccacacaggcctgggatccaatatatggctactccagccaccaagtacataaattataattacatactcagggggcagggaagcggccactggatggtcttctggcccaggggtctcactgtgcccaacactttagccaggattcctttttattacctggccccgtcagccccttctctaacagggaggccacagcgacacttttggcctccagtatcaaggtccactcacatcccgcgtccatttgtcctcaaaatctctggattttcccagcgtgcagccagctgagtgagtgacagcgggattctacagaacatccttgtcaaggtattgcctggtccttccttctggtgacctggccacctctgcaatcaatggttccagacaggaaattagctcaagtccaggaatggagtagggaaccacgatattttactggagtccccgccctcggcctctttcttccttcctctgccgtccgccagggcggcttggctcaacatgacccatcgctttctccaggcttctgggagccatcccagaatcatctttgacccacgacctgcagaacttgccaggtaactaatcctatgtgccaagcaagtgcctccgcctcaatagttcttctgtccccctggataaagcaccctggaaatctaataccgggggtgttccctggctcctgcaggcacatgctggctgcctcgtgcagttcctggacatgcaacctctctactccctggtcaggcctagcaggtccccatccaggttaccctggactttctccctagtcactgctggcagccaagagacaaggtggagcagcccccagtgagggcacctgctgctctggtaggggaggcccctggagcatcttccagcacagaggaagtgctggcttccaagggcaggaggggcccctctgcaagctctgaggggacaggggtctgcagggccatgccctcagggcttccacctggatgtctcagcccatgtttcagggtcccagattttcccaaccggggtccagaccttcacataggccagccgtggccaggcatcaaaacatgcctagagctaggtggtccccacagtcactgtcggctcctcagccatactggttctacctctgccaaacatgggactccttttcagcaaccagagaggccctttgttctcacaccaagcctgatgggcaaccgtgggtaacgtcgcaatctccattcatccctctgtggagcatcaaccccactccccccatgcactgaaagggggaaactgccacacccacaaggcctccccttccaccaggaaaacgtcccagatcactcttggtgaaaacatttaacaattggggccctaactttgtgccaaagattacccatatccccacatcaaccagaatggtgtcctcggtgttggccgggaaacggccaccgcaccagctgagtctcaggcccctcctgcaccacttgtgttaattggggtcttccaagaggcaggtgccatggaagctctgacgtgactggagatttatcagtgcaatgtctgtgaaggatgctgggggggtggccaaagaggacggaagcctcagaccacaggtgagacccctgtgaaggagatacggggagccttggccagcacgtgcccctagacagtgctggccaggccgagggagaacttctggagccaaggtaacccctaaaggattctggtcttgtgaggaggggcctggcttccccctgggagctgctggcttggaagcaggaggcattgcccaggtgagagttcggcatggacccaggggagtggcacacggtgcccgccgtcagctgtgctcaggagcagcaggcaggagccctggactcatggctaccatgtggctgccacactcaggcacacttaggcacatacactcacactcaggcacacttagacacacacattcacactcaacctcagacgcagacacacaccacacactcacagatgcacacagtctcagacacagacacacaccacacacagatacacacaccacagactcaaactcagtctcagacacagacacacaccacacactcagatgcacacaccacacacactcagtctcagacacacacacacaccacatttgcaaacctgctcatcagaagagggacctcgcccccagccgctccgccaccttccaggacagctctgaagggagccctgtcccggagcccagggacctctccccaacccggctgcgcctcacctcaaggaggaaccccggccctggctgggggactgtgaccagggtggggagtggggaccccagacagagccctaccagggacccctgtcactctgtccccggctgggctcaggtggggacctcacggtggtcccagggcccagcaccaagcccacctgtggtttccagcgggaaaggggtggcaggggtggctcgccgcatgcccaggctctgccccaacctccgcgcccaggctctgctgtccctgccctcccggctccccaccctcaggccccaggagcggcagtttctgcaggagctcctgacccggggcctctcgcgggaggcctgagcaagccggacacaggacacggggtaggggaggggtcggggggctgatggggggaaccctgcaccccccagggcagctgctaccaaggggcgagtcccagggcccccgtcggccctgcgtgcggggcgcggtccccaacacccagggccccggaggcggacacagccccagccaggtcgtccgggaaatggggcgggggcgacgggcggccgggcccgggacgcgaagtccgagcagcagcgggcaggggctggcgggggagctcggcccgggctgcaggggggtccccaccctctccacctcctccagcctcccgccctcgagggtccccgcttccctcccatccccctcccgtgcccccggccccctcctcccatccgcggggccgcagcgcttcctggcggcggggcgggtcaggccggcggggcggggtataaagggggcggcgccggccgcggttccctccctgctgcttactcggcgcccgcgcctcgggccgtcgggagcggagcctcctcgggaccaggtgagcgcctcccggaccccgcaccctggaagccgctcggcccgcggggggtgaccccgagtcctgggaaggcggcggcggcggctccgtccctcgggtccccgggaagggggactccagccccagggacggcggggggctcggcgggttcggggctcctcctcgcggggctggggccgcgcctgcccctgtggctccgcgtctctgggtccgaccctcgggcgcgcgacttggggccacctccccgcggcctcctctggggcggagccggcctgggcggggtgggggggtccctgtctgcgcccgagctcggtgctgggacccccgctcccgagacgaccccggcaccgcacgccccgccaggccccgcgtctgcgagcggttcgggtccggctccggcccgcggggaagacgccccggctggctgggacctccgggggcgcagggcctctccccgggccggacggaaggggcggcggggcggggggaggaggggctttcggtgcccgagggcgggactgggcggggaggggacgcgggtggccccgacgccccatcgctgcgcccctcccggcctggagcccaccagggccccgccaggcccaggagaagctgcagacggaggcggctccccagggcggcgggacccgggctgacagcgacccgcagcccctgccgggccgcccacacccgccctgggactccgccggggcgctggtggaaccgctgggcctgggtctccactgctggcaaccgaacggatcggccctctgtggagccgcaggtgtgcgggcgagcggcgcccatccgggctgtgccagcagaaccccggtgcccgcgcctaggacgcccctggagaagggaccttccctttggggtcggaacccagaaaggaggggcctgcgatccgcggagctccttgttcttgggataacacagctctggcttggaggcccccttgcacttcgactctggtgattatttcaagaaaggccagaccgggcacggtggctcacgcctgtaatcccaacacttggggaggccgaggcgggcagatcacctgaggtcaggagttcgagaccagcctggccaacagggtgaaaccccgtctctactaaaaatacaaaaaaaaattagccgggcgtggtggcaggcacctgtaatcccagctaatcgggaggctgaggcaggagaaaatcacttgaacctgggaggcggaggctgcagtgagctgagatcgcgccactgcactccagcctgggtgagggagcgagactgtctcaaaaaaaaaaaaaaaaaaaaaaaaaaaggaaagaaaggcccggtgagatgctttctcttaaacacggccctgcacgttgagttgctgcctcctgtggcctatttcacgtttatgcaaagtcgggcgcctgatgcggggctcacccgccacaagcaggggtcctggtgctgctcatggaaggggccctacccagcccgcggggcactggctgggacggggctgcccaggtccgcccaggatccaaacacccagccccgcccagcggcccttcctggcctgcagtggaggctgtaatgggcaggggtggtgggaatcccagctcacagggcgcctgctcttagaagggcggcatctgggtccagaggtcagaaacgtcagatgcccatcccagaagtggcggggaacctgtctccacaatggatagcagcactgtctttttttttttttttttttttttctcatttcatagataaggaatgatgccttgttggggggtttgttctgcatgtctttggtttttgtgcagtacaaggctatttgggctgtttgatcactgaccgtgtgtagtgatgtgcattgcctggttgtgatgtccccatgttcctaatggatgttcgctttttgggtttttttggttttttgtttgtttgtttgttttttgagacagggtcttgctctgtcacccaggctggagtgtggtggtgctatcactgctcactgcaatctgcacatccctggctcaagcgagcctccacctcagcctccgagtagcggggactacaggcatgcaccactgtgcccagctaattttcttttaagagacggggtctcactatgttgcccaggccatggatgtgtttgtttgtttgtttgtttggggtgtttggggggttttttctttttttattgatttgaaaaagctttattttcccgaattttttattgtggtatacaatataaaatgtactgtcttaaccatttttaagtgtgcagctagttcagcgacagtaagtacattcatagtgttgtgtagccatcaccaaggtccatctccggaactcttttcctcttgtcaaactgaagcccatggagcaccaactcgcatcaccccttccctcccctggcagccaccatcctactttatgtttccaggaatttggccatttaggtgactcatatgagtgaaatcgtatgaaatgtctccttttgtgactggcttatttcacgtggcttaatgtcctccagattgatccacactgtaacgtatgtcagcattcccttcctttgtaaggctgagcagtattccactgcatgcatgccctgcattttgtttacccattcgtctgttgctggacacttgtgttgcttccacgtttgagctactgtgaatgatgtggccatgaacacaccacacagatacctcttggagatcccactttcacttcttttgagtatgttcccagaagtggaaatgtggatcatttgattttttcatttttttgagaattaattgcctcactgtttcccacggtggctgcaccattttgctttcctgccaacagtgcacaagggtccagtttctccacatctgcaccaacaggtgtcattttccgggttcgcttggttttttttaaatgttaaccatcctaatgggtgtgaggtggtatctcactgtggttttgacttgcatttccctcatgattagtgacgttgagcatcttttcatgtgcttgttggccatttatatatctcttgggagaaatatctgtttaagtccttgacctatttttgaatcaagttgattgttttttgttgttgaattttaggagttctctgtatattctggatattaatcccttattagatacacagtttacagatattttctctcattctctgggttctttttactctgttaatgatgtcctttcactagatagatgcaaaaaatgtttttaaattttggtgtaatctgatttatctattttttcttattgtcatacccaagaaatcattgctcagtcccatgtcacgaaggtgttaccttatgttttcttctaagggttttaaagttttaggtcttaaaacgtaaagatccattttgagttaatttttgtatatggtattaggtaagggtctaacttcattcttttgcatgtggatatctagttgtctctgcaccgtttgttgaaaagactgtctttatcgaatggtcttgacggcttgattgaaagtcatatatgcaagggtttctttctggactctctgttttattctgttggtctgtatgtctgtctttatgccagtgccacactgttgatgactgcagctttgtagtaagttttgaaattaggacatgtgagtcccccagctttgttcttatctttcacgattttttttttttttttttttttttttttggctattcgaggtcccttgagattccatctaaattttaggatttattcactatttctgaaaaaaaaaacaatcactgggatttttatagggattacattaaacctctagatcaatttgggtggtattgacatcttaatatagtaagtcttccaatctatgaacatgaatgtctttttttaaatgtcctcttcaatttctttcagaaatgttttgtagttctcattgtacaggtctttcacctcctaagtcaatttttaagtattttattatttttgatactatagtaaatagaattgttttcttaatttcctttggattgttcattgttagtgaatagaaatacaagtgatttttatgtgtttactatgtattctgctattttgctgaatttgtttattagttgtaacagtttttgtggaatttttagggttttctacatacaagatcatatcatcagtgatcagagataatttacttatttctttccaatttgaatgcctttaatttctttttcttgcccaattgctctggccagaacttccagtacagtgttaaatagaagtagtgaaagcaggcatccttcctttatttctgaccttagaggaaaagctttcagtctttcaccactgagtatgatgttcactgtggctttttcgtataatatggcttttattatgttaaggttgtttccttctattcctaatttgttgagtgtttttatcatgaaagggtattgaattttgtcatatggtttctctgcatcaactgcaatgatcatgtgtgagttttttttcctccttcattctgttaatgtgtattacattgattgatttttttttttttgtatgttgaactatccttgcactccagaaataaatcctacttggtcaattcattaaattccatttaattgcatcaaattataccaaatttagtttactattaatagtattttgtttaggatttttgcatcaatgttcataaggaagactggattgtagttttcttttcttgcaatatctttgtctggtattggtatcagagtaatgctggcctcataagaatgagttaaatagtgttcccttctcttcaagttttttgaaaattttgggagggtttggtgttagttctttatgtgtttggtagaattcaccagtgcagccatcaggtccagaggttgtttgtcaggagatttttgagtattgattcaatctccttactagttatgtctattcagattttctatttcttcatgatttgattttgtcttgataggttttgtctgtctggaaatttttccattccatctgtgttattcaaattgttgacatatagttgcttatagtacactcttataatcttttttatttctgtagaattagtagcaatgttgccactttcacttataattttagtaatttgagtttcttctttttttcttagtctagaatctagcttaaggctggtcaattctgttatcttttcaaagaaccaacttttgttgtcattgattttctctattatctgtctgttctccattttgtttatctttgctctgatctttattttttccttctttctgctagcttgttctttttctagttccttacattgtaaggttaagctcctatttgagacctgtcttttttaatataagcatgtatagccatcagtttcccccttagcactgctttcactgtcgaacaagtttttaaatttgtgttttcattttcactcatctctaagtattttataatttcccttgtgatttcttctctgatccttggttatttaacagggtgttgtttaatttcgtgattttttaaatgtccttgttgctgatttttaactttactcctttgtggtctgaaaagatatcttgtatgatgtagatctttcaaaatctattgacacagactttgttgttgcaactaaccccgtcattgcaagcccttctccgtctggttgaagtgacttccaggagatttaaagggctggcacccttttctcccttcatttttctctttttcctcttttgagacgtagacattgaagactagcacattcaaaagcaaccatatatgtggagaaaataaaaaagtcattgcacatgctcaggggaagtcacgggcttagaaaagacctaagaagaccttaagtttatactttatgctgatccttagcacagagacagcaacaatcaaaattataaaaacaagaaaaaccagcaaactctggggaagaaagagattttgatttcacaaggcatacaaagaaactttcctatttcaaaggaaaaaaaaacaacagaaactgtcactgaaaaagacttggtggtagatctactagacaaaggctttgaaagaactatcttaaagatactcaaataactaagggaaaatgtggagaaagtgaaagaaaatgtaggaacaaatgaaaatatcaataaaaagctagaaattttaaaaagaaaccaaagggaaattctggagctgaaaagtacaataactgaaatttaaaattcactagagaaatgcaaaggcagatttcagcaggcagaataaagaatcagggaacttgaagatacaaaaatggaaattattgagtctgaggagcagaaataaaaagattgaataaaggtgatcagagcctaaggggtctgtgggataccatcaagcaaaccaacataaacattgtaggagccccagaagaagagagagcaaagggagcagagagactatttgaagaaataatggctgaaaacttctaaaatatgatgaatgacatgaatataaccatccaagaagcccaaaaagctccaagcaggatgaactcaaagagacccacactgaaacattctaatcaaattgtcaaaacccaaagacaaagattttgaaaacagcaagaaagaatgattcatcacatgtaaggaatcctcaataaaactattagcagatttctgatcagaaactttgaaggccacaaggcagtgggccaatatatccaaagtgctaaaagaataaaaactgtctaccaagaagcccacatccagcaaaactgtcctttaaaagtaagggagaaattaacacattcttagatcaacaaaagctgagaatgttccttaccactagacctgccctataggaaacgccaaagggagtcctgcgggttgaaataaagggtgatagacagtaattcaagtgaagaagtaaagatctcagccaggcatagtggctcatgcttgtaaccccatcactttgggaggccgaggcaggaggataacttgagcccaggagttcaagaccagcctgagcaatatagggagaccctatctctataaaataaaaatatttttaaaaatcgaccaagcatggtggtgcacacctgtggtcccaactactggggaggctgaggtgggagaatcatttgggcctgggaggttgaagctgcagtgagctgtcaccacaccactgcactccagcctgggcaacagagcaagaccttatctcaaaataaataaataaataaatatctcagtaaaggtaaatatatagacaattataaaagctaatattgctgtaacaatggtgtgtaatgctgctttttgttttctacataatttaagagactgatttaaaaataacattatgcttttggacacataatatataaaggtgtaattttgtgacatcaataactaaaagggttggggacagagccattcagggagcagagttttgtttatgccattgaagctaaactggtataaattcagtgtagactgttataattttaggatgttaaaatgcaatccccatggtaacaacaaagaaaataactaaagaataaatacaaaagggaatgaggaagggatttaaatgtttcaccatcaaaaaaattaattaaacacaagacagtgatactggaaattaaggacaaaaaaatccataaggtatacagaaaaaaaatgcaaaatgaaagaagtccctctttatcagtaattactttagatgtaaatggattaaactctccaaactctctctgttaaaagacagagattggcagaatggatttagaaagccaaatccaactatatgctctctacaagagatgcactttagatccagaaacataaatagattgacagtgaaaggatgggcaatgacatgccacacaaatagtaaccaaaagagagcaagagtggctatactaataccagacaagataggctttaaatcaaaaaaggttacaagagggaaagaaggacatcatatattaataaaaggctcaatacagcaagatataataattataaatatttatgcacctaataacagtccatcaaaatatttatatcttacactgggaagattgttgctggctctcagtctgcttccagtctgctcatattgcttttgttgtaatgatggtcatatgtgggagctcagtgtcaagagggcagacttgagcccacactgccaggcttcagacctcagctattagctgagtgccctgggcaagttacctcactgggccttggtttcctcatctgttggagtggggatggtaatagtacctatgtccaaggccataagtccaattgtgaatgttgaatgaagggatataggacagtatctggtacacaattattatagatttttcattgacattttatacattctgttttcttcaaagactttttggttcctgttttgcactcagatacttccttttcctggagtttatttgggagcaccatgtgaggtagtacctttatttctagtcacagggtgagccctcatcccagcctgcttccaccactctgaaaggccaccatgtcatagcctaagttctcgtgtgttgttatgcccatggttgtgtggagtgttggcctgttccagcaccaaaaccaaaactgtaattttatcgtttcatttgatagcacaagctttctcatcactctattttttattttgctcaactcttcttgctttttctaccaagtaaaacttggattcattttgcaaactcctatctacaaaaatgcaaaaaattttcttggaaactttaattaaaattgcattctattatagattcagttaggaataactgatatttttaaatcagtttaagatagtgggatgatttcttatccaaaaacaaggtttgtctttccaatatatttctcaaaaatttttttgagtttttttcataagtcctgcacatttttattcagttgattccttgggtttatgttgtttttcttactagtgtaaatagcatttttctgcaacattttctaactggttgttagaaaatgtttcttctaactgatagaagaaaatcaataactttttgtatgttgaggactaagctctgatttttttatcttgcctatattcttatctaaggggtctggggagtcatgccctacaaaccataaattctcatcagatggttttatctaaccctatatgctgtgacttactttccatctgactctggcatgacactacacgaccaagaagaaaataaaaatattttaccccaaaacatgtttctttgccacattttgaaatggccctgcaaagctgtcctttactggggaaaatttgcatctgtaaggaatctctgttaacatagctagctctttttcttccaggccctcccaattctgaagagattaaccgagagtctagcagcttttaaaggtctcagtaggaaacacttgtcattgattgtctctaagggcagccactatgagacttcagaagaaccttggtctccacagtcttttatcttaacctgagcatttcctttctatgatcccaggtctttagacaaactcaaccaattgtcaaccagaaaatgtttaaatttacctgtagcctggaagccatctctccccgctttgaattttcctgcctttctggattaaaccaatgtatttcttaaatgtatttgattgatgtctcatgcctccctaaaatgaataaaaccgagctgcaccccagccaccttgggtacatgttctcaggacctcctaagggctgtgtcatgggtcatggccactcatatttggctcagaataaatctcttaaaatattttacagagtttgactcttttcatcaatgatatatttttctaagtggctcactaaattttctctccctaatctcccctcctttctctttctttctctctttctctctgtctatatatatatatatttttttttctcttttttaaaaaaactttgttcagatgattttctgggtagacaatcctatctttaataaggacagttttgtctcttcttttccaacagttatacttttatttttactgtcttattgcattggcttccaacacaacactgaatggtagcgtaagatctgcactgtttgcccccaccccattttttttgtactgtagtaagcattcttctaatgcaggattttttaacccagggttagatctacgaatggaatccctgaattcctggacatgatttctgtatatgagcatctatgcatttgtgtaaggtgaaattgtgtagactcttaaaagggtccatgaccacaaagataagaaccactattttagctttttgtgtaaaatatgatgtgagctcttgatttgaaatgtatatcctttatagagttaattctactcctaaatttcttactaggttttaccttgtctggctgttgttgtttcttagttagaaattgatgtttcagggatctattgaagcaattgcatattttttcccattttatgttaatgtgacttacattaatgtattccctagtgtttgtggcaacactgtactttaacttcatattatagttctggtatagtggtccttaatatgctattggattttagtttttaatattggctagaatttttgtgataatgttatgggatttttagggtgtcacttttctggcctgaaacctctatggccagtggcgcctttgcccaagttcttgtcctgtgtccaggaagaatgaggtacacagacaagtggagggtgtgcaagacagagaagctttattgagtgttaggggagctcacaggagacccgcagggggcagcccctctctgtaggcgggttgtcttgtcggcgggttgtcttgtcaaatgttcagctctcagcagagagaaggccctggagtgggtggctcctctctgcaggcaggtcatcccattgtctctgcagctcttagcagagaggaggccctcgagagcgtgtctcctctctgcaaacagggcatctcaactagtgttcagctctcagcagagagaaagccctggagagggtagctcctctctgcagctggtcgtcctgacatcccttcaggtcctgaagctctcagcagagagagcacctcctctctgcagctggtcgtgccatgctctgccctgctctgactgagcctggggcttttaaaggcctcagagaggggaagtgcatgctgattggtccatgtgcagccatgtgcaggcccagaagaaagcaccttgagttcccctctggtccgtaggacgggcaacccggcccccaggcttcaggcctgccccagcctgaaggtggggcttcactggggacccatcctcttctgcccaggagcctatctgcctcctgcagccatccatggtgcccaggctgctggtaccaaggggcaccggtgcccagccaccctcagcacccccccaagcctcccctcctgcacttctcagtgcccacagtttggagggggccaagtcagcagggggctggcatgtcagcactgccacaagcatgcacccacccggccaggctgtgacagtgcccaggctcagccccaactctgctctgagattggagtgggtggtgggagcgggaagaagctgggcagcgggaacaggcacctccaggcctacaagggaaagaggggccttccctggctccccaagagtgcagcgatgcctgggtcagcagccccagttggggcagctgaaactgcaccaggagtgggggctggctcctgcctcctccatggagcagaaggcccagatccacagccacgacttgggcagttgtacctggggaactctcacctcgccaaactgcaaggggcagggatcccacttatccccggctcctgctggctccgtggagcatggtacctggccatgtcctctcgcagcctggggcagggtctccagacctgggccagcatcccagacaggggcaacaccgccgtgagctccccttcacccagcacaccacccggcccggccccatggcagcggcccccagggaggcagtctgcggggttgggggcctgtctgcctcttccatgggccctccctgagcagccagtgtgatggcagcggccacaccagatgggctgccgctgccatcagtaatatttatagtgatatttatctgtagagttacttttagggacttttttttttatcaagctttggtcacaggttatgcaacatttaaaaatgaattgggaaaaagtttatctttttatgttctaaaacaagttaaatagcatgaagtgcttgtccttgaagctgtgaaactcacccacaaactgcctgagctggcacctttgggaacggacttcattcctccctgggccccaggctgagcaggtctggcctgggtcacctcatccactccagacgccgcaaaatcacagcaacccttcagggccctctcctggcagcgcctcccctagtcccggtgcttggacactcctcccatctgcaccgaggagagggcggcactccaatccctgcattacccctggaactgcacgctctgaaccaggcccggtgccctttctgcccagctgcccggctgctgccagccccactctgcggagccagcagcacagtgaggcccgtcctgatggcctcctggagctggagcttaggccaagccacagggcatcagggaggatggacgttcaagggctggatctgtttgccccagggtcctggcacccaacagaaaggaaagccaggctaatgacggctgtgtccctacacttgacagagtcctccctccctccttatcaaagtcctgtttaaagggaatggagccaggctggagagagagtgcctagctctgcaggggagccggtctggggaagctgggatctctctcccgccctcccctctgcactgtttccagggcagccccaggcagtggggggcgccagacagtggtgctccattcccttccatgccgacgcgcccagctacccactccacccagccctggaggacatggaagggcctcaaccatccaaatcccacccaaaactgagcccagaggcacccactaaacatctgtgaccccacccagggtggggcaagagggcgcaagccccccagtccagatgctggtgacggtgtgtgctgggcgcagaccccgcttccttgaagactgagggcagtgcccccaatcccgctgacctgctgtgcgtgcgcctgccatgggggagggtgccaggggagaggcactgggggtgtctgagcgacccccacccctgttgcaggacttcagggccacaggtgctgccaagatgctccagggcacctgctccgtgctcctgctctggggaatcctgggggccatccaggcccagcagcaggaggtcatctcgccggacactaccgagagaaacaacaactgcccaggtgccaggggtcgggggccgggggctctgggcatttggggggcagttgggaccagtacccaggtgccaggggtcgggggccgggggctctgggcatttggggggcagttgggaccagtacccaggtgccaggggtcgggggccgggggctctgggcatttggggggcagttgggaccagtacccaggtgccaggggtcgggggccgggggctctgggcatttggggggcagttgggaccagtacccaggtgccaggggttgggggccgggggctctggcattcgggggcagtgaggtcaaacccacaaacaggcacggggccaggaaacggggctccaacagcagtccctcctgaggctggctcgtgacaggtcctgtgccccacagagaagaccgactgccccatccacgtgtacttcgtgctggacacctcggagagcgtcaccatgcagtcccccacggacatcctgctcttccacatgaagcagttcgtgccgcagttcatcagccagctgcagaacgagttctacctggaccaggtggcgctgagctggcgctacggcggcctgcacttctctgaccaggtggaggtgttcagcccaccgggcagcgaccgggcctccttcatcaagaacctgcagggcatcagctccttccgccgcggcaccttcaccgactgcgcgctggccaacatgacggagcagatccggcaggaccgcagcaagggcaccgtccacttcgccgtggtcatcaccgacggccacgtcaccggcagcccctgcgggggcatcaagctgcaggccgagcgggcccgcgaggagggcatccggctcttcgccgtggcccccaaccagaacctgaaggagcagggcctgcgggacatcgccagcacgccgcacgagctctaccgcaacgactacgccaccatgctgcccgactccaccgagatcgaccaggacaccatcaaccgcatcatcaaggtcatggtgagccgcgggcgggagcaccgtccacgcgccaggggtggccacggtgggccgtccacccactccgggcctcactttacccctctgtgagtgcggaggccgaaggaggaagctccgggcagggcctgggccactcaggtgtccctccatccccacccagactcgaggtgcagccgccccaggtctcgaggcacacggctaaccagcatgtctgtcttttctgcagaaacacgaagcctacggagaggtgagtggcgcttcccttcctgccagtgctggccggcagctgacccagcagagatgaccgcgccaggctgccgactcctggcgcctccaggctggaacagatgagaggagagggagtcacctgctccatgttggacctgaggccttggagtctggagaaagggctcccagccaaagctaggctgtttagatcccgtgagggtcagcgttagggtcacccacagagcacgtgttacaaggagaggtcgagggtctggcctccgggcaggtgggatccatccaccctggactcgaggcccgagcccagcccagcaggtcaggggagaaggaactgacatcatcggggtccatgacatccccacctccctgtgtgtcccagctccagctctcaggaaggggagcaggcatctgagatctcccccgtgaggcttcctgcaaaaacgtgccctgcctcagaatcgctgctcagtaacagtggtttcattgccgtgtacaaatggtgcctccctcaccagtgccccttgctcttccatccttttgtaaaatttattcttttatatttgtttttttagagacagggtctttctctgtcacctaggctggagtgcagtggtacgatcacggctcactgcagccttgaactctgaggctcaagccatcctcccacctcagcctcccaagtagctgggactacaggcacctgccaccatacctggtgtgcgcatgtagttccagctacttgggaggctgaggtgggaggatcgctttcgtattgtttttttgtagagatgggatctcactatgttgcccagcctggtctctaactcctggcctcaagcagtcctccctgcctcggcctaccaaaatgttgggattccaggcgtgagctgcacccggcctttcttcccttctattttctgtcatggcttaagccaggcttggttttttaaacttgcctagaacacctgaccgagagccaaactctttggcttgtccctgatgggggcagagcctcacagcaccccatgtctcacagctccctcacgcccgcccaggttctcagggcatttcagcatctccttggcccctgctgagagtcgtgggctacacgttctgagaccctgccctgccacctgaggaatgtcccacccatgcaaccttctgtctctgcttcctcgtttcagtgctacaaggtgagctgcctggaaatccctgggccctctggccccaagggctaccgtggacagaaggtaagatgcccagattacctgcagggtctgcgctaccaggaagcccctgatttgttttgaaatccacacttggccgggcgtggtggctcatacctgtaatcccagcactttgggaggccgaggcgggcggatcacaacgtcaggagatcgagaccatcctggctaacatggtgaaaccctgtctctactaaaaatacaaaaattagccgggcgtagtggcatgcgcctgtagtcccagctactcgggaggctgaggcaggagaatcgcttgaacctgggaagcggaggttgcagtgagcagagatcacgccactgcactccagcctgggcaacagagtaagactctgtctcaaaaaaaaaaaaaaaagaaaagaaagccacatttaaggccagctgtatctcaaattgtctcaacacttctgtccctggagaaactaaaactctatatgtctaattccttttaaatagtatattgagaaaagcagaagcttgtaaaaaatgagatatgccattaaaatactttggtaagcaagcatattcaagtaagtaaaatgtgagatgcactacacttaataatatgattgctcattaatatgaaggaacctcttttgtggcttactaaataagcagttttagggagcctggtttgaatgtcccctgcattttctggtttgaacatcccctgcattttcctaacagaggtgcatcaaataaagtccttccaaaactcactaacagagtatgtgaaactccaacaattcacatctgttaaaaattataaagaaaagcataggaggagaaagtagcttctaaggagatgaaataaggaattgaccatcatagaggatgttactgctacgtagcttcgtgtttttctaaatttggataacagctgtctagaccagtaggtatctggatgtactttctccaggatgagacatctcgaggctgcaggtcaaatcctgccatctccctccctggcttctccagtcctggtggcaatgccgaccctactacagctgggaatgaatttgccacttggggcagccttggctgcacacagcagtgcagtgacccgttctgttgggggggccactggaagctgccacagggatcactgtggttagagtttgaggggtggcaaggtgccaagcggagcccaggacagggcacagctgtgatgttccagaagcctctgcccacctcatcccctgccctgagtttcctcccttttcttccttttgacctcttaattcttcccctttcctctgctcctctttgcacttaaattgggagcatatcaataaatagatgaatttatttaataaagttctgtatcataggttaaaattttaattccaagagagtgtaacctttatgtggtgttctgaagtcctgatctgtctaaagttacttagataaaggaattaatctttgtagtgacggtgacccaggcatcgctggagaatcagagcccagtgttggccacagtcacagctactgggtgcagaagggacccccacgggccaggcacccccaccccaggggtctcttctggctccattttgcaggtggctttgtgggaagcttccctcagagctgggagaaatgggtcaaagcaaacccttgtctgacagaggctggccctttggggagcagctgacaccaagacttctccacttgggcaggggaatcagtaacctctgctgtgtcacctctcagaggagctgtggcagggtccccagctgcctaccgcccaccctaccctgcctcgatgtactcttttctctgcttttagggtgccaagggcaacatgggtgagccgggagagcctggccagaagggaagacaggtgagtgtccttgccccacgcccgccccgcctgcagcccagcgccccagggctgggctcacactgctgcgttgtccttcacagggagacccgggcatcgaaggccccattggattcccaggacccaaggtgagtgacctcggccaggggcttggctccaccctgaggccccagcactgccaggcaggctccccccagcccagcctcggcctcagcctctacgaccctccccccagttaccaaggaacagaagcacctcgataacttgatggccgtcccaaaacccagcctccagcccgacccagggctcagcctcctccgcagactgtttgtcgagaacactagatgccagcggcccaccgagcactcccctcagcctgcagggctggcccttccctgcctgtgtctctgcagagctcctcactaatgcccctctctcctcctgcccccagggcgttcctggcttcaaaggagagaaggtgaggctcttgccctgacagacctcagacctgcgccagcctcggcccagacccacctcttggcgtccgccgcagcctgtcactgctcctggggcaccggcctggtcttttctcagtggtggctttgggggctcctggggggtcctgtggccttgagtttggcccaagggctttgccccccagaggcagcagtgcccatgatgctttgaggcaccgagctcactgcgccggctttcctcctacacagggtgaatttggagccgacggtcgcaaggtaggctggctgggtaggcagagcccctccttcctgctgctcagggcagaaggaccggggctaatggagttccctcttccttctctcttcagggggcccctggcctggctggcaagaacgggaccgatggacagaaggtagagggagcctcgggctcacagctggactggtctcacagaggcatcccagcctctgcagggcccccagatccagcctgatctgtcagcttacacatgtgtacacacgcatacacacacacacacacacacacacacacacgaacttcagctcctgccacatcccactgccccacccagggcttcaccagcctgcatctaattcatggctgcacatcccggcttggggcagctccacagctgcacacagaggccagcaacaagcctacccactcccaggtcaaaccacaggacagccccacccactccttccatggctccccgtgggaacatcctctgtgcccagggagctctgccctcagggcctctgggaggcagccagggatggcctgttcctgcacaacggccactctgcctccccggagacagctccacagcagccgtggcctcatgtgggcacccgtgtgccaggaggagagcgctgcagccctgcggggcagaaccgggtgggctgtgtcttggtcgttggcacacatggaccccagaaccccgccctgagactcctcctgcccccttctccttcagggcaagctggggcgcatcggacctcctggctgcaagggagaccctggaaaccgggtaagggccgtttgcacccctccttcagcctcggcccagggggtgtgggtgcctgaccgggtgggagggtagttgctgctgcagtgggagcgtgggttctcccggcagcccagcagccccagcccagcagccccagcccagcattctgccgggtcggagtcatgtgaggaactccccctgggagctcctggcggatccccgtggcctggagacctgatgcatcccaaacttcggtgtcactggacagctccatttccctgagcagcagatccaggcctggcctcttggtcactgagcctgggcctcacagtgagggtgggaggtgcgtcccgggctgggacaatggagcacttgggccctggctcatggggagaaccccacccgccgtgtgccgagctccacctctcactcctctctcagggccccgacggttacccgggggaagcagggagtccaggggagcgaggagaccaaggcggcaaggtaagtggccttgtcagggtacggggcaggcggggtcaccagcttccaggggcctcctggaggcagccccagctgagaagctgagcagagagggcctttctggaaacactggtcagtgaggagccaatggccgtgggatgtggtggagggtgccctgcccgttgcttcatcagcttctaaccagggcttgggcggccccgccgctgctcaccgaggcctcggcaacaaacccacctcctcccaggtggagccccagggagccccacccacacctcctggagctccccatgggaacgttggtgccccaggggctctgccctcctgggccgcctgcagtgtcgccccgcccctggcggccccaggatccccaagggcttttttctgggagcttggacttagggcttcccactttctgtccaccttccctcagcccaagcccaagtctggctgagtcctctgagcagatgcacaggcgtcctgcccgtgacacacactctgccctcagctggcacggaggttccagcagcccccagccagcatctggcatcccaggtgccccgtggacatcagggaggtgcagtcccaagcccgaccgtgggtcctgcccccgcagcgggcatcctgcaccccccttcccctgccaaaagacgtgaggctgattctgcaaacccttccagggggaccctggccgcccaggacgcagagggcccccgggagaaatcggggccaagggaagcaaggtgagcccctctgcctcttcgcctgcagctgagctggccacactcacgcccatggcccagatgaacagtcacgctggccaccatctctgctgtcaccatggtgccgcattgggctctggggacacggggagggacaggaagaacaggccatgtgccctgagccaccagcccctctgacctgtgccctcctcacgaggctgaacaagttccaggggaccctgcagggcccccatgtgcctggcaagcagattccgctggaagataataggggctccacaccacacaccgcacaggcgtgaccatgcctcagggcccctgcctctgggtgactgtgctgtcctctccttcttcaggggtatcaaggcaacagtggagccccaggaagtcctggtgtgaaaggagccaagggcgggcctgggccccgcggacccaaaggcgagccggtgagtccctcctgcccctgcctcagggccccgctctgggcatcctccttgcagcttgaggaggaccatgggggaagggcacctgggctgtaggcaggatcccctgctggcaaggcacagccaggcccccatcctcccaagaagtggacccggaccaccccacgggaccccccagagctggacttagaggtaaagcccaggcaggtcctccatggtgttccctaaacccagcaccagctgcccagggcatcctgtgagggctgagcagggcccgtcccagtgctgaccactccaaggggactctgtctgagcatggggcctgcctgggagtgaccgcagtgactggacagcaccaggtccccaccaggccccagcccatcacctaaaacgccactcaccagacatccaactccacctggagcctccccagatcattcctaaatcctcggcatgggcgggaccgacgcagcagagggacgagggctggcagcagagccactggcgcaggctgaggctgttgggaaggagcctggggatcgaggtcccaggtcccaaagccagagccctcctgtagagaaggagcatcggccccggcacagcccccaccctccacaggctctgggcttggactcagccccctccctcacccacacgcctgttctctgcaggggcgcaggggagaccccggcaccaagggcagcccaggcagcgatggccccaagggggagaaggtgagtcctcgtgtggaggcagcccagggtctcactgtggtgcccatgggccctgctgacgagggccccaaccccattcctcccagagaacaacagaaccccagggcctcactctccagagttcactctctgcagagtctgggaatgcagccctgagatccccacaccccattctctgctgaggaagctccactacccacccaggcacaccccgcacagctgtgcaggcaccattcacccccggcccactgaggcaccactcacaccccccggcccccactgaggcacctcttacccccagcccactgaggcattgctcacccacgtgacctcaggggtgatgctgaagggctgtgtggtaaaaccccggccaccagctccccttgacatcaggtgaaggggcttcctcccaggaagtggacgaggtcctacccacgtgtgggtggcctcagggggaccgagagacaccgtgctcagagcggcagctacaggcaccgggaaggagctatgggtgaaacaggcgactgttgcaggtcccccgggacagacggggttcttcctcccaggcccccttccccaacccccggccacacccgcctctcacatgggacccaggccggaggcctcagctgagacccgtggggcctcccttcccttcccacagggggaccctggccctgaggggccccgcggcctggctggagaggttggcaacaaaggagccaaggtaggggagcagggtgggccgcaccccaaggtaggggatctgagggggtgcaggggggctgcaccccaaggtagggtggccgggactgcaccccaaggtaggggacccgggtgggtgctgcaccccaaggtaaggggggcccaggtgagggctatacctcaaggtaggggacccaggcgggtgctgcaccccaaggtaagggaccaaggcaagggctgcaccccaaagtaggggacccaggtgagggctgcaacccaagataggggtgcttaggcaggggctacacccagaacccagcctactccactcagtgtgctcagggctgaaggtcaagtggagccacagcctccggggagggtcataggggccggggccagacccgtcttacccccgaggccctgcagtgtccacaggattgatactggggactccagggtgctgctgtcagtcaagagaaccccaaattcctcccctttcttccagggagaccgaggcttgcctggacccagaggcccccagggagctcttggggagcccggaaagcaggtcagtgtcagtgcaggaggccggtgccctctgaccccacgggtgggtctcccctatccatgtggggacagcctggagctagccactgtccccatagcaaacccaggcagcagagcctggcctcagaagccaggacctgctcccctagaccccgagtacctcatacccaccctcagccccagccccccatcctgccctgaaggacccaggttgtggagtcaggggcaaggcagtgggcctgaggtcctggatgggccacagggaaaggaggagctgggaccctcaagacagaggtccacggcccccacaggcagcaggaggagctgcggccatgtggcctggtggtcagggctggacggggcatgtcaggtgacccctgggcatggccagtccctgcctgtgctgacttctgaatttctctcctgccctcagggatctcggggagaccccggtgatgcaggaccccgtggagactcaggacagccaggccccaaggtacgtgcccctcccccagcaggacgtattaggggttcggggcagctgcctgaggagcaggacagggggccggcctgggggaccctgttgccggcagacgtgcctcaggacgggcctgtgcctcctgttctcagctctggagtgaggggatgcctccggggtccaggaagcccccctggctctcctcttcagcagtgacccttgggtgtgcatggcacatccttcctgaggcagggcctgagggcagctacgtggcctgagtagggtcctccccgcgtgtgggcaggcttcgggtctctaggcacgtccagcccccactggaggtggacagggcgaggttggccctgccaggcctctgctcacagccagaactcgacggcacccctagcccacttccaccccagtgtgcaccttgcgccctgttgagcacagccccccagccccaccccgtcctatgaccatgctgaccgactcaacgtcctcctccagggagaccccggcaggcctggattcagctacccaggaccccgaggagcacccgtgagtcacagcctgggatggcagctcccaggagtgggtggacattgtcccaagggccctgaagattcctagtagttccctcaaggcctcctctgtgcagaagaaagtgtgaggtccctcctgcgggacagagtggtgagaaggcttcgggtgactcagtgaaggataggtccagcccagcatcaggaaaagagcacagctcagaacgcagcacagtggcctcacccagagtgtgaatgagcgagggagggaaacggggctgcagaaagctgcccagagggaggaaggagcactgggatctgaggctgagtcaccctggcttctgtttgcttcacagggagaaaaaggcgagcccggcccacgcggccccgaggtatgtgtgggtcctggccacctgtgcccacccagggtgggggtctgcacgcccaattgctgggaacacaatgcccaccgtcactgacaggaccacccctgtcttgagatggtcctggctccccaaggcccagccatgtcacctatgctgagctctgggggagctgtcagccactggctggtcccttttcaaccaaagttcaggctttgcaaaaaaaccacatagatgctcccgtttaaaggaccccaaaatgccagatcgatttttccacataaaaatctcactggtgtccctggtagagacagctcctctgtcccaggctaacatgtgttccctgtcacagggaggccgaggcgactttggcttgaaaggagaacctgggaggaaaggagagaaaggagagcctgtgagtgtcaccgtcccgaagcccacagcagctgggcagaggcagggaggggccctgaggctgagcgtgtgcatctatgagtacaggagaacgccaggcagcttggccccagccatgagcaccacccccaccttcctaaagggaacggctggctcaggggccccctccctcaacccagcctcccttccagcgtcccctccccagtgaccccccaacatcccccccacagcatcccccacaagggtcccctccctagtgacccctccacaacatccccccagagtcccctcccagcatccccactacagcatcccccaccagggtcccctccccagcgaccccaacatagcatcccctccagagtcccctcccccaaaagatgcctccacatagcatccccctcagagttcctacacacagcattccccaagggttccctccccaatgtcctccccacagttatcccccagaaggtgctctgtgcctccaaatccctagcctggccaagggtttaaccagggctgcaggttggtctggaactgagcacaaaacaagggatggataacgatggatggatgggcaagtggatgggggtgggcaaatggatggatgggaggatgggtgatggatggatgagtgaatagaagagtgggtggatagaagatggatgaatggatggattgctggatgagtgggtgggtggatggataagtggatacatgggtgaatgagtagatgtatgggtgagtaggtgggtaggtgggtagatggatgggtgggtgggcgagtgtgtggttagatgatggatggctgaatggatgagtggggggatggatgggtgagtgggtgtatgtatggatgggttagtgggtgggtggatgaatggatgggtgcataaaggatggatggatgaatgagttagtgggttggcagatggatggatgggtgagtcagtggatagatggatgggtgggtggatagaggatggatggttgggtaggtgatgggtggatgagtggatagatgggtatgtgagtgagtggggggatgggtaggtgggtggatggatggttaggtgaatgagtggatggacagacggacagtgggtggatggatgagtgaacggatggaccgatggatgaatgggtgggtgggtagaggatggacggacaggtgagtgggtgggtggatggatagatgggtaagtgagtggatagatagatgggtgggtggacagaggatgggtggatgaatggatgggttagtgggtggctgggtggatggatgatggatgggtgactgggtggatggatggatgggttagtgggtggctgggtggatagatggatgggtgattgggcgaatgggcgaatgggtggatgggtgggcgtggagttggtgggtacatgataatggggtggaatacccatggattggaatgagctgttttggctgctatttctgggacacccagctctgccaggcccctacccctctggtgggccaggctctgacggtggccactcatggcctttctagctctggtgccagcatagggaaggaggaggcacagccttgtcttactccttgcacctgttagcccccccccccgccaagggaggacccgtggttggggacagcacagggggccctgctgtgtgcagggactgtccctggggccactgaagcccacctgttcttgttccttctcaggcggatcctggtccccctggtgagccaggccctcgggggccaagaggagtcccaggacccgaggtaggttggtggccagtccccatgccctccccccaacctgccaggccaacacacacccaagcctcgtggttctgcccacggtggacccacgtatcagtgggcagtggcctgggagagactcagccacccagccttggccccagagtctcagcctcatccttccttccccagggtgagcccggcccccctggagaccccggtctcacggtaggtgtcacatggggcagaaccagtgtccttctcctgccaaaactagacaccaagagcagcaggggtgggggaaggtcagctggcacggtcagagagcaagatcagtggaggaggtcagagggcaaggtcagagagcaagcttggttggggaaggtcacagggcaaggttggtggggggaggagggtggcagcgaggttggtagggacaggacccgccagcctccccgcatggctgcctccacacgtgggctggaatgtcccgggacccccaggccaggaccttgctgtggaaactcttctggggccccggggggactaccctgcctgccgtgtgcattgcaggagtgtgacgtcatgacctacgtgagggagacctgcgggtgctgcggtgaggcactgcccacggcagggtcggggcccatgcaccgggtggagggcgggagtgcagcagggctgggtcatcgctgggtcctgcatgtgcacgtgaccctagggtctgaggtctccccggtaccccccgatgaccctgccacccccccagactgtgagaagcgctgtggcgccctggacgtggtcttcgtcatcgacagctccgagagcattgggtacaccaacttcacactggagaagaacttcgtcatcaacgtggtcaacaggctgggtgccatcgctaaggaccccaagtccgagacaggtcagcggggcaggggcgggtgcagcattgcggggggccgggcggggcgtgggaggcgatgagatgggagaagtccagacgcgtccctccaacgagggcctctgcatggctggggatgccccagaccccgaggcctctggcaacgacctcacgcgtgcggcttgcagggacgcgtgtgggcgtggtgcagtacagccacgagggcacctttgaggccatccagctggacgacgaacgtatcgactccctgtcgagcttcaaggaggctgtcaagaacctcgagtggattgcgggcggcacctggacaccctcagccctcaagtttgcctacgaccgcctcatcaaggagagccggcgccagaagacacgtgtgtttgcggtggtcatcacggacgggcgccacgaccctcgggacgatgacctcaacttgcgggcgctgtgcgaccgcgacgtcacagtgacggccatcggcatcggggacatgttccacgagaagcacgagagtgaaaacctctactccatcgcctgcgacaagccacagcaggtgcgcaacatgacgctgttctccgacctggtcgctgagaagttcatcgatgacatggaggacgtcctctgcccgggtgagcgtgtgggcgcggggcagtcggccgaggagcagcaggccccagccgctgtctagcgtgagccccagggacacccctcacctgagggatgaatgtgcagcccaggatcttgggctgtgggtgggaaggggtcgggccctctcggggctgcagggcagaggccagctgcaccctgagcctgtctaggcagatcagtgaacggccgctgagggttcgctagggactgaccctggcctggcccggcctctctcctctcttccagaccctcagatcgtgtgcccagaccttccctgccaaacaggtaatgcagggcaccctgagccaccaccccagactagcaaagcagccctggtgtccttcctcctcgagggccgggctgggggaggggccgtgcagggacccggggggcggcggagccactgcggaggctgctccttagggagatggccccaggatggcagcacaggggaggaggggcttggggaaggcaggctcccaggaacgcaggaacagcatcacgaggccatgaggtgggtgctgctagcctggcgctgtgctcggcatgtggccactggtcttgaaggcccaccatgggccttgcagtctccctcagctgccgcccagctcccatgggctggccgtgcatgtgccactcggaggaagccctggattcagtgagtgaaaccatcccggggtggaagcactgacaccccccagcaccagcaggtcttgctccaaccctggcctgcctcggagctgcagctgcggctctcacatctctgggagtgggggagcccatgtcccggatgtggcccacgtgggtgtgaagctggagctgggggtgccgtccaggctctgctggacgtggtgctgcccccatggtgcactgctgcaccgtacctgggcccacaggaggtccccgggggcgttaggagctgagtccccctcagtgagccgtcccctccaggagtgtgagggtagggatgccatggagacagggtgggagggtccgacctggaggaccacagggaggaaacctcagggtctgcggtacgaagtcagcgcttcctcagcacgcgggtcgcggtgtgcgttcgggcgttccatggggagctcccggtgggtgagctgggccactgagcacattcacaggccctgaggctgccccaggggaggagccgtggactcagagccgaggttccccatacgtgctgcgacagagaacctagggcttgcacctgggtctggctgcccttcagcaggcgggcagcctctggccccacaacagtgggctgtgcttctgccgccaaggtgcaggcgtcctcccccagggtccacatcagcagcaggggcacctggaccctgagggcaggaaccagaccttggctcctccacccaccccctcgttcctgatggggcagggaagtctcgggaccccatgatgggcgacatggcgatggtcactgtgggtgctttgctatcaggtggggggccttcctctccactctgggtccagtgtgagtggccgctatggcttcccctccactccaggttctatcgtgagtgggtgggtgctgcgtctgtggatgtcacgtgacctttcctctttagcctatcattgtagttgggagttagttagcccgttgagcgtcattgaatttccagtgttgagccagccctgcgtgcccgggataaacccacctggccgtggtgtgtggccctgtttatgcacgtgggccctgattcgctgatgcctgcctgagggtttgcgcttatcggcgacatcagcctgcacttttcttttctcgtgatctctctggttctggcctcagggtgacgtgggcctcgtagggtcctgtggtggctcctccccagacggtgacatggagtgagcccattctccctcctgggagtgggtcactcaggccaccagagcaccacagggaaagcagccagggaggacacggaggcccttgaagctctggcctcttctgaggcctccaggacctgacagtgagtgggagcagccctggcagaacccctcccctcctctcggccgccctgacacctcatccccgacactcagagctcatcctccttcccagctgtttccaatttcaaagtgaactcgaccttgtggctccaggagatgcagcagggacagtgttaaatcggctttcaccagcccacacggccaggcatcctcctcggccctcctgggcactgggtggacaccactggctgtggcctggccctggccttctccagacagccctgtccaccccaaagcccagccaccctgggcctgcagcaggcctgtggagttctcagttgcgtggggaccagagggtgctggagaaacaaaccagacgcagctgaaggcagtcagggcagggcgcaatcagcgataagagctgcataggggccacagcgtaacctgagctccagtcggtggaaagaaaaggcagagacgttgcagaggccaggtctgctcaggggaagacagttctgggtgtagaggactcacatcccagagaggctgaggaagggtttaccaccgcaagctttctcaggcgggctcttgaggggtggctggggtcttcctggcgacgggcctgcggcactggaagccctactggagtttggcctgtctccggcacaggtttggacggagctgttttgtgctgaaaggttttctcggggtccgtggtgtcccccaaaggtgccaccgtgcgggtctcctagctccctgccagcttcctgtccctgtgctcactgcccccacgcctcctgccaaggccgagccacacacccgctccacctgcatttcctctaccgactcgccagcccaaatgccgctcttcactctggcctcgctgagcggctgcccgaggaggagctctaggccgacgcccaccgcaggccttacagtcttctctggacgctcccttgcagatgcaccgtggcctggcggcgagcccccggtcaccttcctccgcacggaagaggggccggacgccaccttccccaggaccattcccctgatccaacagttgctaaacgccacggagctcacgcaggacccggccgcctactcccagctggtggccgtgctggtctacaccgccgagcgggccaagttcgccaccggggtagagcggcaggactggatggagctgttcattgacacctttaagctggtgcacagggacatcgtgggggaccccgagaccgcgctggccctctgctaaagcccgggcacccgcccagccgggctgggccctccctgccacactagcttcccagggctgcccccgacaggctggctctcagtggaggccagagatctggaatcggggtcagcggggctacagtccttccaggggctctggggcagctcccagcctcttcccatgctggtggccaccgtgtcccttgctgcggctgcatcttccagtctctcctccgtcttcctgtggccgctctctttataagaaccctggtcattgaatttaaggcccaccccaagtccagaatgacctcgcaagacccttaactcactcccgtctgcagagtccttctttgctgcatcaggtcaccctcacaggctccagggtttgggtgtggaagtctttggaggcccttacttagcggcccagctgggctgccgtgcgtctgggatggggctgagggagggtgctgcccaggtgctggaggatgttccagcaccaggttccagcggagcctcggaaacaggccccagaggctggtgagcctcgctgggtgtgggcactaatcccgtgcatggtgactcgtgggcgctcacggcccacctggtggcaggtgaaggcttccggttgggcagcagatagtcctgggggaagctggcagtcctggcaccatgacgtatctgggctggtgtcatgcacagtagggcgaatggccacagctgcctgccagcagccctgatcccggggtgtctgcacccttccagcccaacctctgggtctccaaaagcacagtcgggggagcatccaccaggcacaacctctgcggtcctcagaggactgagcagagaatcccagggtccacaatgttggggagcggcagggatcaccatccaaagggagcggcccccacggcgagctgaccccgacgttctgactgcaggagccctcatccaggctgggctcctgccgggcacggctgtgaccatttctcagggccaggttctcgtccccacacccactgcacagggcaggccaggctggtcttcccactgtggggatgaaggatcctccacaggaggaggagagcagagtccacagacatcccaacagcctcagcctccctgtgcctggccggcccccacagcttccccgtctcctccaggccccacagacactgatgaatggacagagacccccaaaaccagctgccccttgcatgtctgtctccatatgtttggtgacagcagtgaaaatgttattagttttgagggggtttgggaagcccagcggtacctgaggagtttctggacatttaagccggttcctaggtgtggccttaacagggaggctgcccttcctttcactgaatgagctgcgtcactcataagctcactgagggaaccccatctgccagctcgtgcgtgctcagacggcgtccatgtctcaagcgttctgtgaaggctgcggtgcagcgtgaggtcaccctgctgtgttcagagctttgctcactgcctgcggggctggaccgttgcacctccagggcccccagaaaccgagtttcgggtcagggtcctctgtgtgcattcctgggggtccatgtaccagctgtgacgacgtccaggggttgggctgagaagcagacacccttggggaaactggctctgtccctcccctcccccatcccaggagctgaggtcttggtgaggccacagggccaggtccacgcaaggactgtccgtgtcctgtcctgtggtctctggccccacgtgacacccacacgtgtggtaggcagcctggcctgggttgtggctatggccaggcccccaagctgtccccgatgcccagggctggtgaccacccaggcaggtgggggccccacttggtaacagagtcatagggcagaacccacctgggctgccacagaaggtctggctgcccctgtgcccactgctccccaccatggccaatcagaagagtcaggggctcctggtctttccgggagggacgtggcccagccagctctaggtgttctgagcagctctgggacccagcgattgaggggtcaggctgggggtgtcagagccagggtcctccttaagtacctcccacactacacagacagtggcccttttgtgggcagcaaattcttgagccatgaaaggatgctttgggccccttccctcccaggagggcagcctgtgcagggatggtgctcagcaggtggacagggcctggggcctgtgtcagggtctcaggcctgggagcaccagcagaggagatggcggctcccagcagtgccgcctgaaagtgtcttgggctaaggacccacacccagggctgccctgcagaaacgcccccgcagagcccagtggtctgtgaggttgcaggcagggtgcgaatggaagggcacaggtgcggggctggcacctgcccggtcctgcccacctcccctccgcccagcccgcacctgcgtctccccacagagctgtccgtggcacagtgcacgcagcggcccgtggacatcgtcttcctgctggacggctccgagcggctgggtgagcagaacttccacaaggcccggcgcttcgtggagcaggtggcgcggcggctgacgctggcccggagggacgacgaccctctcaacgcacgcgtggcgctgctgcagtttggtggccccggcgagcagcaggtggccttcccgctgagccacaacctcacggccatccacgaggcgctggagaccacacaatacctgaactccttctcgcacgtgggcgcaggcgtggtgcacgccatcaatgccatcgtgcgcagcccgcgtggcggggcccggaggcacgcagagctgtccttcgtgttcctcacggacggcgtcacgggcaacgacagtctgcacgagtcggcgcactccatgcgcaagcagaacgtggtacccaccgtgctggccttgggcagcgacgtggacatggacgtgctcaccacgctcagcctgggtgaccgcgccgccgtgttccacgagaaggactatgacagcctggcgcaacccggcttcttcgaccgcttcatccgctggatctgctagcgccgccgcccgggccccgcagtcgagggtcgtgagcccaccccgtccatggtgctaagcgggcccgggtcccacacggccagcaccgctgctcactcggacgacgccctgggcctgcacctctccagctcctcccacggggtccccgtagccccggcccccgcccagccccaggtctccccaggccctccgcaggctgcccggcctccctccccctgcagccatcccaaggctcctgacctacctggcccctgagctctggagcaagccctgacccaataaaggctttgaacccattgcgtgcctgcttgcgagcttctgtgcgcaggagagacctcaaaggtgtcttgtggccaggagggaaacactgcagctgtcgctcgcccaccagggtcaatggctcccccgggcccagccctgacctcctaggacatcaactgcaggtgctggctgaccccgcctgtgcagaccccacagccttgatcagcaaactctccctccagccccagccaggcccaaagtgctctaagaagtgtcaccatggctgagggtcttctgtgggtggacgcatgattaacactagacggggagacagcaggtgctgagcctgttgtgttctgtgtggagatctcagtgagtttttgctgttcagaccccagggtccttcaggctcagctcaggagccccacagtgaaccagaggctccacaggcaggtgctgacctgacaggagtgggcttggtggccatcacagggcaccacagacacagcttgaacaactaccagtatcggccacaggcctggaggcatcagccgggccatgcttcctctggagggctagaggaggactagagaagggcctgccccggcctctccccagcatcccagggttcctgatctcctggataaggatacaagtcaccacactggactggggctcagcctgctctagaatacctcacctaagtcacagtggaccaggctcagcctgctctaaggtgagcttacccgagacactggaccagagatcagcctatcctgggataagctcacccgagtcacactggaccagggctcagcctattccgggatgagctcacccgagtcacactggaccagggctcagcctattctaggatgagctcacccgagtcacactggaccagggctcagcctattccgggatgagctcacccgagtcacactggaccagggctcagcctattccgggatgagctcacccgagtcacactggaccagggctcagcctattccgggatgagctcacccgagtcacactgggccagggctcagcctattctaggatgagctcacccaaatcacactggaccaaggctcagcctgctctagaatacctcacctaagtcacactggaccagggctcagcctgctctaaggtgagctcacccgagacactgggccagagatcagcctactctgggatgagctcatccgagtcacactgggccagggctcagcctattccaggatgagctcacccgagtcacactggaccagggctcagcctattctaggatgagctcaccagagtcacagtggaccaaggctcagcctgctctaggatgacctcactggagtcacactggaccaggactcagcctattccaagataacctcacccaagtcacactggaccaagctcaccctgctccaggatgatctcacctgagctcactgcatctgcaaggaccccatttccaaacaaggtcacatccagaggtctggggcttagggttaggggttggggttggggttgggggtcaggggtcaggggtcaggggtcaggagtcagggtcagatttagggtcaggtttagggtcagggtcaggtttagggtcagggtcaggtttagggtcagggtcagggtcagggtgagggtgagggtcaggtttagggtcagggtgagggtgagggtgagggtgagggtgagggtcaggtttagggtgagggtgagggtgagggtgagggtcaggtttagggtgagggtcaggtttagggtcagggtcagggtcagggtcaggtttagggtcagggtgagggtgagggtgagggtgagggtgagggtcaggtttagggtcagggtcagggtgagggtcaggtttagggtgagggtcagggtcagggtcagggtcagggtcaggagtcaacatgtgaaactggggaaatgcagttcactctggataccctgaaactttgttgtcctttgaaaagactcactcttttcttcatactccaccgctctgtcatctgaccaca

SEQ ID NO: 751 - DNA, 97196 bp, Homo sapiens
acactcgaggaggcttaaaacaggcacagggatggaatgagaaaccccagctgccctctggctgtggggtcagtggaagcctcaagtcctcttccttgattgggcttctaatccttcttgtcttgaaacaggcctagttgcctcagtggagcattttactttaagctgattttggaatgtcacatacctcctcttcaataagaggaaactccagcctcactgcaacaagcaaatctattaacatgattgcagatccatcactgggagctggttgggagggtgagaagagtggacttgagctggccctccaggaatatctcccaggatatcccagcataaaccctctggtctattctgggaggcagggaaacaggagcctgccccggagagactgaacttaggaacacactgcacagccgcaatccagggtttacaggacaaagatcgaggcacccttcagcagctgtctggatgctgggatgcggggtgtggcagatgctgctgctgtggctgcgacttccctttgagtcctggagactgtgatggaactcggatgcttagtctgttacacagtctgccactgcctcttaacattcagggagctggagtcttcatattggcttctctatgactgtgtgtatgttcaagttccttctagcagagcctgagacagggtgttgtgcaagcgattactgagggagagctcccaggggaaacctagaaggaaggcaggaagaaggatgagggcaggagaagaagccaggcaaggagtgggttctgagaagtcaggctggtcccatggcaggtgttctgcagtgagaatcctcttgccaagtttttctggcccagaggcaatggactggagtgtcacatcccacatcagacatcactggctgtgggccaccccaagggagatgggctataaccctgtactagttatcaactgctgtgtaacaaattgtcacaaaactagcaatttacgacaacatgcatttagtatcttgggtcaggagttcaggcttggcttcactgggtcctctgctggggtctcagaggctgaaacctccgtttgggagactacatttctttctgaaacacggagtcttttcaaagctcacgtagatgttggcagaagtcaggcccttgtggttgtcgagttggggttcctgcttccttgcttgttaggagctgctctcagctcccagaggcccccacatttccttgccattggccctcacaggatggcggctcactttgtcaaggccagtgtcttagtccatttggatggttgtaacaaaatgtcttaaacttggtggcttaaacaacaaaaattgatttctcatgtttgggagtttgagaagcccaagatcaaagtgcccgcagattcggtgtctggagaggtcctgcttcctaactcgtgcactgcaccttccctctgtatcctcacatggtgggaggatggagcagtctctccatatcctcttttataaggcactgatcccattcatcaaggcttctcctctacgacccaataacctcccaaaggccccatctcccaataccatcactttgggggttagaatttcaacatatggatttttgggggacatgacatccagaccccagcagccagcaagataatctctccctgccgtttcctaagacagagtcttctgtgatccctgggtgacttcccacgacccaactgtaacctaatccaggaagggacaccattcatttttgtcgtgttcaaaggctggaatcagggctcagcttccatttgcacgcaaggggggtggattacgcaagggcttgactcctgggggtcatcttggaattccacccacctcacacaccccaatgtgtccagaagagacagatcccagcatccacgaacagtcctccaggaaagggcgtgggtgtgaaccactaacatttgactctcatctgaggggagtcttgcagaggcacccatgggaccttccacactgtccttgcccgcaggagaaagggcagccaaagtctcagaaaatcgccatccctcaggccaccttccaatcccatagccgtgtatctggatggggaggccccatccccatcagggccacagctacaagggagcttggaaaatggagttctgaacttgctaacttgtgtagttaaggacaagataagggaagaaaatgggaagaggtgccaagagccagttcaagcctgcagtgaaggggaaacagaattgagatattccgtgacttatgaggtgaactgagagattcagtgacttatgaggtcccaccgatggccgggcctagatccaggactcaggacgtttagggcagctcaaacttttgaggttgttttcctcctgggatcaggtagcagagaggaactggaaatgtaagtgggaatccacatagtggtgattaaggaagaaagctgccatagaacccaaattctctcttgttagcacaagggaggtttaccatgagtttctggaagtttctagagccatgggcagtgctgaagaggatctggatcatcaatgagtaggtgcagctaaatattaaagattatggtttcctactgaatgggagcttttatttctttaaatcatgttctaaatgatttcttgcccttgctgtttaaatatagccatccattggtatccatgggggactgattccaggaacctccatggatacccaaatccacagaggccccaatccctgaaggaaggtggtgtagtatttgcacataacctatgcacatccttctgtgtacttcaagccatctctagattacttataatacctaatacagtgtaaatgccatgtaaacagttgttatactgtgtcatttagagaatgatgacaaggaaaaacatctgtacatgttcagtatatatgcaatcatctactttaaaaagcatttttgaaccacagttggttaaatccatggatgcagaacccatggatacgaggtcgactgtaatagaaactttcaataccaaggaatgcatctgcctagcgattttgcgaaaaagagtgtatttgtatttgaaagaaaccgtggagtggaaacacctaaaacgtgcttgttcagttaacctcagtttgctgagctgcttggagcatggggttgtaatcaaagattgtcttcttcgcagcagacaatgttctgggagaaatagtcctccttagtgctgaagttgcagactctaaccaagggggtggcagcaagtatccccggtctctgtaggggcttgagtcaacgcctgcactgtgcagagaggatgagggcagagaattggatgccgctggaggggcgtgttgtccttctacatgtcatgcaggcagcgcggttctatactcggagcctctgctcagcgtgtcttcacctaagaaccccataattcaggttccatccttgttccctactccagtgctctgcaagtgagccctttggtttagagatgggttgggcttctttatgggagaggaagggagccctggagctgcagaggggagcaggcattctctctggggtgctgtctcctttcttccctaaattggagggagataatccatggaaaggagttaatgatttctttgctcttcaaacttggtttggaaggatctctcagtcaaaaagaacctttcggatgtctcttgatatttcacattaatggacttttcataaggaccacatgatgggagagcagtgagaagtttggggatggccaaagctgggttgtcatttgagctctgttactaacccagactggacaatgacgatgtcacttactctctcggaacttcttttcttttcttcttttcttttctttttttcttttttctcttctcttctcttctcttctcttctcttctcttcttttcttttcatttcttttctttctttcctttttctcttttttggagtctcactctgttgcccaggctagagtgcagtggcgccatctcggctcactgcaacctctgcctcctgggttcaagcaattgtcctgcctcagcctcccaaatagctgggactacaagcgcctgccaccatgcctggctaatttttatatttttagtagagatttagtaggggtttcaccatgttggccaggctggtctccaactcctgaccttgtgatctgcctgccttagcctcccgaagtgctgagattacaggcataagccaccgtgcccagcctgtttctttcatctgtaaaatgggaccacaatttcacctaataaaagaagacatctttctatttaaaagggcttagggtgttgatgtttgtgataaaggagagaatgtatattgaagtgttttgaaatgtgcaaagctttctagaaacagaagttcttactcaagtattttcccgaagctttggcaagataaccatttttattaccccgtctgtgcctagaatgggcctataagcgccacaatcagaatcattagatatagaaattaagagaaatgtagcctccttttttttgccggtgaacagagctttggttaacagaaaaccaaggcgattttaattgctggtttttctatttgaagggggaagttattagtagaagtctcaattcagaaacttcaagaagaaatgggagggtgtggtgagggtaagcgggggactgcatttcctgttttcctttcagatggtgttggaaaacattgcaggaaaaccatggatacccacgaagaaattccaaaatttattctttttgacgccaagggcccagcccaaaaggtgacgagtaggagtggtcaatttttttttttaagagttggggcttgcaggagtccagctaaacgcttgtagggtgaagacagaattcagagggtgacatcagcctgagcgggggccagaagaaacagagtggaggagtctggtttcatttacagttttgggtcagttctgcagtgaggagggggagaggaggggtccgggagggaggaggaggaggaggaggagctggaggaagccctgactggtatccctggccccagtccagtttggagctcagtcttccaccaaaggccgttcagttctcctgggctccagcctcctgcaaggactgcaagagttttcctccgcagctctgagtctccacttttttggtggagaaaggctgcaaaaagaaaaagagacgcagtgagtgggaaaagtatgcatcctattcaaacctaattgaatcgaggagcccagggacacacgccttcaggtttgctcaggggtaagtgtgatttctcttctgtttttccaggtttggggctagaaggaaatgctcttaacctgaagtgatcctttctaggtagcgttagtggctcttacgttcatgctgatcgccagttttctgtacatgttttaggtctctggaagattccgctgatttttctttctcactttatggcaatgggatttccttaaattggttaaggtcatgattgcctaagagtgtgagcacttttccaccgcgtgtctgtggctgctacacgcgccctgtgcattccgggcggcagtgtgtttcggcccatgatttatttaagttactgccgccttctaaaacccattcgggatccgctttgtttgcagaagcgtctttgctgaggactagcatagctccctgccgggcggctccgctgggagatgttctctgagctctctgggtggtgacactaggtcagggtgcaacaacctgcatgggttttctgcccagggccgcccatgggaaggtcctggtggagcacatttgctgctttcacaagattggagtaactctggtgctcaggatcagggccaagtaaagggtcgctcagtcattgccgtcaagctttcgtctttccaggaacctgaagtctctattggagactttgtcccttggggttgcttaaaggagttgcaggggtcagaggagaagaaggaattgggcatttgggcagcatgctgagtgtctaaggcagggcccctggggctgcagggccagcccatgctgcacagaggtgaggccagtgccgagctgggaggccccgagggctgttctctggcccggaggatgcagggtggggctcgggccctctcttgctgaggatggacacgttcgctgacagtggccagcctgtttggggaacctgtttcaaggggcctactatgttggataatgaacgggtattgaagtatgggtggggtcactgggagggactagggagtggttaaagaaaaatctgcttccacaggaagccccaggagccagtttcgaggccggtgcagaccccaggagcaaacccctctgagcacaggggagtctgctgtgctggatggggaggcagggctgtggccccggctgactggcttctctccccacatacagctcaccccggcgaggaccacagggtgctagagctgcagggtgctcagagctcacggggatggtggatgctcaacctgggatcccccagctccccagggtcccattcttaatgctgtaaaaaacaaccgaaatggctttaaaatcaaagttacattgctcctaagcaaaactatattgaaaactgagtgggtggccgttgatgacattactgggacttctgaggtttttgttgggctaaagataatggaagagatttttggtcagaagccactgatgcagtagtttcctggttttcaaaatgagcaaccaggggctctgagatgcggaattccttgcccaggccagggagcgagtgcctgagatggcagtgaaatccttccccattgaaggagagcagacaagccagtgacggaggatcccaaataactcacatctcgttgggaaaactgctttgggctcactaagactctaccaatgaaccgagaaagaagggaggtggaccgtggggcgggggcatcggttccgtgaccggaataccggggctggccgccctgctcaggccacctcctgggggtggagggcgctgaaggaggggacctgtatgctcttctttctgaagtgggcttgtagctgaggatgaaagcctgggtggggaggcgtggcttttacaaagatcaggatgtaggaacagctgcctgtctggacttctttgtttagggggtttcttgctacccagaggtttagttctctcctttcctcactcatggtcgagagaagccaggaagcagacactgagtggagcagagggcttgggaaggaattccatgttggggtgaagtgaggctgtcctggcttttcctatccaggcattggagggtgtggctacagcacctttctgggaggtggctggggaagcctctagaatgttagcccttggccccgctctttccctgcttggcagggagcgtgttccaccccactatagttgtggcccacaggtgaggggacatgtggcaaatgtccaaacctggggtctgaatgatatttttgatacgaggtaggcacctttctgaaaaattgtctttacttcacacttcattttatttctaaagcattcaggactcagcaaattgcactgactttatcatcagtgccttttgtgatttcctatcctagaacttaatacgtccccgatgagaaagtaggaagaagctcctctcttcagtcgattgttgatttatggttccaatgaggctgctcatcctgaccttagtttcaggaacggaacccatagacctggatgcctaaagccagcttgaaacaagaccgccttctttggaagctttggaagctggcagtgactttttgccagcgaggtttcatttgtttccttgctcagagtgttcagacaactggatcaagcgtagtcttcaccagcggttgatatcacctcccacttatatgtgaaattccatgtttaggacttaaaattcaccggcaagtcgtgaatactattgcgtgacacttccttgcaggcgcagtaacagctttagcaaaaatttttatttgaaagttcagttttgtcactgctctttttggaagaagctgaaaatctgctatctcttgggggaaggattgcaggcggtttccatctgacagggatgttgtgtaccaggcagcttttccaccctgacttacgggagcaaacttttcatggtgtcctggctgcagcaagcaggcagtaaaaaacacatcactgctacataaatagctgacgatttgaggagggacctgacatttaaagaaaatcctattagctctagctaagaaaatgaaagccgcaaaccctccaaattttaaagtgggggagctttaaagtttcctactaattcagacagccatgaactagacaagaatggttatcttcattctcccgtttctagatacagcttctctgtttccactgtaaaacttcagtggaattcagtgtaaaaattcagtgcaaagaaaggacaatcctattctttaaataaaacatgttgcttgccccctctaatgtgtggtcatgaatgtcttatttccagggagtattccacaggtcctgattttgcagagatattcccttcaacaattcactttgttaattttgaaaaatataatttttaatacattctggtcttatagtccattttgggaaagagatgaaattttgagggctgggcactgtggctcatctctgtaatcccagcactttgggaggctgaggtgggcggatcgcttgagcccaggagtttgagacaagcctgggcaacatagggagaccttgtctctacaaaagcgttttaaaaaattaaccaggcatggtggcatgtgcctgtaatctcagctacgaggctgagttgggaggatcacttgagcctgggaggttgaggctgcagtgagccgtgactatgccactgcacttcagcgcctgggcgacagaaccagaccctgtttcagaaaaaaaaaaaaaaaaaaagaaaagaaattttgagttagcacgttcatcctggtctgtttttgaaaaggcagtttggttttctttcctctagagggaggtgtatctctgcgagcttcagaaaaatctctgaagtggtgcctggagtctcccagggtggagtttcagggtttgtagtaactcagtgatgaccatctcagcagagcttgcgggcagttttaggactgatatttcaatacatgattgtcattattatatttattgtggctgttcataataacggaagtgtacatacgttagagctttgtttttcttctctgctcaggtgtaagtgtattgagatgaaattgtgccatcaaaggaggcatctttgttcccaaacaattgcattacaagggtattcagcaaataagacattttataggaagcattttacccatatctaattacagaggtttaaatgaacagtcgggtgcttgagaaccaaagtaggtttgcatattcatgccattgcgtatccctgtagaattaccggattttagaactgtaagggtgctcgtgacatgtcctttgatactttcccctaataatggacaatgggttttaacatacttttaaaaattcacacaagctatgattatgaatgtctcgtcttgaatatttattaatacaaatatatattactgactctcagatttatgtctgttcgcttgagataaccagcattaagactctgagggagacaattctagctcagagcaaaacaaacaaacaaacaaacaaacaaaaaaaacaaaaacctaaccctttggttggtctttgtgttctcatgtttacttaagtttaacaagacctattgtgcatcatggccttgagccctgaggttcagggaggggatatatccctaatgctaaatgacgagttgatgggtccagcacaccaacatggcacatgtatacatatgtaacaaacctgcatgttgtgcacatgtaccctaaaacttaaagtataataataataaaataataaaaaaagagaatacattcttggggaatattaaaaaaatgactaagacatagccccctctcttctggttggcaaacatataatttctgtttggctaattgaaatatcaaaaaaactactaccttggtggatggtttctccacgccctttatgcttcagatgaagaaagagagctcagagaggtatgcccagtgacagggccacagagctagtagcagaattgtctgatgtttccaatatgcagacatcttggaatctggacatttcaagggggacaagcctttaagagtgtattttagggtgccatgtggagaaaggtactcttcccattcccagtcttccttggagtagcctcttttaagttgattcagcagaggagtaactgttgcttaaaaaaatctggaaagaaaaaggagagaagaaaaaaacaaatacgaaaagttctgccaaaccttctcccaaaggcaaattgttagtcttgtaggggtctggctgcattcagcatagtatgatcctactgttctcctgaagtttaaactcatgaattacagagaaacatttgagaattgcaagtggccagggaaaagtacaatgggaaatgtttctgtaaaaccccctgtgtgtgctatacattaggttttcaggaacccagagcatcaggaattggtcactggaaggaagagctcatggctcggtttaatttcaaaattaaaaattgaacagcagctggagttgactcagatctcaagggaaaccattccaggaaactggtttttcacttctggaatcttcattagttgattcagcagcccagggccggtacccagagttagcgccaactcagctaaacccacagccggcccggcggtgcaccagggtgctctgtttctaactggggctgcagaaaacccatcattcatcagagcccagggcaacagatggaagagagcagtcgcaggactatggcctgttcgagcaacaggcaaggagccttcttttacacaaaagggaggctgggagagattggccgaccattgctgacagaggcagtaaggaagtagaatttcccaggttactgcaataaatccagcatggatgatattttatcagatgttccaacttgatttttgaaaaggtttctgttttcaagaatgattttatcttctctacttgattataaattagactagaaaacagacaaaatatctaacttttctctttacaaagagagcacctttcagccactttaatcatttacagtggaacaccacagttttggaaaggtcagtagcaccttagttcattgccaagaaggaaaagacaggaataagtgccaagctccaatttggatccagcagcgtcacgtggcaaggagttggaatggagtgggcatttgtgcaatatttcttgaagcattttctaatgcacctttcttctttaatgttgaaatggaactagtctctgcctgatgtttataattagcagtataagtgcagacaaaatcttgtctggctgccgtatatttcagaatgtggaatgtgttttacatttgcatggtggcgtctagcttttcaaatcacaccagatatggaactttctgcctcatggttattatctgcaatgctaggaatatgttttaaagtaattttttcaaatatctgggtaattaatctggagtttcttaattgcctttgtaatgggaaggagacccacctctgaggagcttggcctaagcctggctgcaggtcggcatattcttacaggtgctctcattcacagagggagggcattggtaggggatgtccaggccttctctttctgcattgctttgttataatccacaagttgcagaacaggtgttgctttgttagattttaccaggaagagttgaagatctcgaatccgctactccatatctaacaaggacccccgtaagtgacaaaggaccccagtaggtgacaaaggaggtctagttaccctgcctgatgagaagagttttaaaatgttgctatcacaggatacacattcagtttgagtcaaacagattattgttctagagtattttcatagaatagaaattcaaaggccaggtgtagtggctcatgcctataatcccagcacattgggaggccagggcaggaggatcccttgagcccaagagtttgagaccagcctgggcaatatagtgagatattgtctctaccaaaattcaaaaaaaattagccaggcgtggtggcgcacacctgtagtcctagctacttgggaggctgaggtgggaggattgcttgatctcaggaagttgaagctgcagtaagctctgatcatgccactgcattccaacctggacaacagagctatactctgtctcaaaaaaaaaaaaaaaaaaaagggaaaaaagaaagaaatgtgaaatccaagttgttaaataaacagtaaaaaaacaaaatttgctatatttctttggaggtttcttggagctcttccaaaacattttcttttgaggattctcctttgggtctttcaaacaccaagagcatattaaattccactctcctcctaccctaattgcaggacttaataaatcctttcttagcttcctccctgaggaaaagaacggggactcctttcccaggattcgtgcaaaaagagagagaaagagtgagaaaaagagaaagaaatggggcgctccttcttgcagtctaggaatgggcgtggcaaaggcaagggtggatgagtgcctcaaatttactgaaatttgactttctatttcacagtcagtgtgcacggctctcccactgtggtctttgactatttccactgctcccattttaaacaggacaattaggaactaacagaagtcccagaacttgataggagggacaggctgattttaaaaagcagtgcttggagaaaaccaaataaatgacttcaaaatggaagctctggatttatttgagtctttgttttcaaactatttccttgtgtgcatgcgtgtgtgtctctttcttaaaaaagatttccagacatggaaaatgaaaaaggttttgagtaggctaaatgaaaactaatttacagaattgcaaaatagcttgggaaatcatattcattggaatatgattgaatatgatttcaggttgaagggccatgtagggcaatctttctgatgaaaggtatccttttaaatttcaaagggatagaaactaaacggaaaaaggcacctcaaatcctttttagaatgaggcagagtaaacaaaaagatgaataatcctaaacagaaagatgagaatgaaaatgtgatgaatgtctcttattgaatctgtttcctttaggacacagaatctaggatgaaggaacagaccccttccagcccaaggatctcaagcagccaattctgagtctttttttcatatttgaaagaatgatagtagacagccgacttccattgacatagaatctgtggtgtgtcaccaccaaggaagtctattttttccccaaaaggcatggggagtttccttgagatctgggccaaatctggcacagcctctagggtttcccggggttcttcccatgagctttggaaatgctaacttgggttagggttctggttctatgttgtttttatctatgtagctttgaacaatcactttgccttgctggggtttcaatttctcagctataaaatggagggaaatcagccatcggatggttgggaggagggcgtgaaatcccacccacaagacagaagcccaggaaacgttaccagcactctcctctctccttcctccgggagggtggtgtcggggaatgagcgcggatggctgcctcattccctcttgttgaagagggcgggtggtcatctggtgagatggtgtttgacatcttttaataatctaaatgaaaaagttctccaaaatttgctgccagggaatttcgtttttttataaatggagactccaggacatgacaaacaatagaagagagttaattgcaaacgaaaatatcagcaaatattcaacagctgggctaggagcccacgagccacaagacctgcttcccgcatgatggcaggaaagtgtgtggggccaaaggcgtttttcccacctgggaattcagctcagtcaaaccatatgggttctgaatcatcagtggagcctggataacgcattgtcctacaggcattatctcccgtccttttcagagctggaagggctcctttccttctcttccctcccctcctcttccctcaatatctggatatattctggataaaataattcctgtgcacagtgtatttatcccattactttgtgttccaatgggaagtatctccactgagggggctactcctccaaagattcacatcttgaaaataaaaatctttacatatgattttcaatgaactaaaagttcattttactcagaatggttgaagtaagtgagtgatgtcttagacttcccggattttattttgtaactatttagattgtattgagcactctggaagatgagaaatgtaattttggaattgctccagagtgagcccactcaatgctttatatgtgacagaatcagtggattcaaaggctttcactgtgtgaggtatgggaatgattaagaaaaccattagcaaaacctgctcaaggcataattcacttgtgctctttgtcaatgctccctgcacaggtgtctgcagctcttcccatcccagactcaacagtgaggagacagctctcatcttatcatgtcctattttttccacctggattacaaagccgaatgctttacaaagagcctctataatactcttgtgttctcattcacaaacaaaaataccacttaaaatcatgcctcttgaacatggattaaacatttaaagtaatcgaactggatcttccagaagatttgcattaaaatttttaattgaagcagtgatgcttaaacttttggggggtgaggagtggcacaactgccttttagaatcacatacaaacatggacccttatctccagaaaaaccctcatccatagatgcaattttgcactcaactgtgggaggatcatagactctttgaatctgttgatcccgtattaaaacattgatctggaccagttacaataatacaggttgttttggaaagaacaggccattttcttagaaagaatctagcaggaagcttacctttgctaaaaaaaaattgacgctcaagcttgatagaacgaatcaagaatagcacatataaaatgtacttttatattattctgaagtgtatatcattatttaattgaggtcatacaaaaaattagatattgcaattgctttttttttttatttgaagaaacactcaggaatgggtctaacagactgtagggaagaaaggtagagcttggtggaaaagtctggaaggttcccagggttgcatgggcttgagggattcctagagagtgaaggggcaaagttggggctgtggcacggtgggggtagggtcaacctaagtggagggaggagaacaggcagtccagcctgtcgggggtccctgagccctgctgtgctgcgaccgggctaaagcttgggagcattatcaaaccacagcacaagcactggagactgctcttctacattgtgttaacatatatccatgtccaaaaggcagtgaccattgcaagggaaaaaaaatcgggctgagcttttgcaatactgccgctatcaccactcattgctgtcactttgttgcagaaaaatatctgttctgttgataactggcctcctgagcatcattagaacagcattcctttctcactgttgatgcatttccaagagactgctgtattgacaggtggttctattttagctgctgagatcatggcttcaagttctcagaatctgaatcacagggtacatttgtttcatcacaggtggtactttttgttgactttctttggaaatccaaagccacatgggtcctggtgttcattcccttgtttgtggcttcatctgtctccatctcaccaatttttggcgggtcaggcctagggcccacactgtgttccgtcttcctcatagctgggccgcaagatttggactccagcttctccctctgggcctgacctcaggcaggaggaatttcacggcaaatccacgggactgagcttcaggtttcctttgcacccacttagctcctgtccttgactggcagcctcaatcactctctgtggctctccctgtacctttgctaagtggtccatctggacactagtctgctgctccattcatggcaaagttacatcactcatcagccggacagactctcctctgctatcaatcttcaggtggcaaggctgagaacattagatcatcctcatccctgatttcattagctgtatggggaaaatggaattcctgtgctacacaacagacaaccatgaagacttgcagagcccatgggggcacctgtggagagaggaagattaagatagagatacaaaagctcaggccttgggtggagccgattccaaagctcagaggatactagtcaaggcagaagccatgtttgcaccaggtctgaatgttcatattagattctttcccactttcatgagactctgatcttctttgccaaaccctaacattttgcatgacatatactcttttcttatttctttccaaatcttatttagaagtaagggcaaacattgtgttatttgaatacagcggcatgtagacacactttaggatgtttagttgtactgttttttcctagtagctcttaaactctatcacacctcaaaaaagagatgctgcacttacatcattcctgttaaattgatggctacattttaggggtagttacccatgcttttaaaacctggcaaatgatatttcctgtcctcatttctattttaattgtggtaaaaaccatataacataaaacatactatcttgactatatttaagtgtacagtacagcagtgttaactatacgcaccttgtgctacaacaaatatctataactttttgatcttgcaaaacagaagctctatacctatgggacagtaactacaactgcctccctcctgacagcccatggccaacaccattctaggttctttttctaagactttgactactttaaataccttcacataaatggaattataaagtaatgcatttgtcttttagtgactggcttatttcacttagcataatatcctcaagattcatccatgttgtagtagataaaaggatttcattcttttataaagctgaataatattccttgtatgtggcatgtataagacttagtataatacagtaggccgtgcacagtggctcacgcctgtaatcccagcacttaggaaggctaaggtggaaggatctcttgagcccaggagttcaagaccagcctgggcaacatggcaaaaccctgtctctactaaaaatacaaagcttagctgggtggggtggtgtgtgcctgcagtcccatttactcaggaggctgagaaggaaggattgcttgggcctgggaggttgaggctgcagtgagctgtgatcgtgacactgcactccagtctgggtgacagagggagaccctgtctcaaaaaaaaaaaattacagtataagtggtgtaataacagtgcaaagtcctaggagaactgtaggaatagcagttaatgaatttaacaaatatttattatacacctacaatgatacagacaggcattttgccatactctgtgctcagagtgtggctgagcttcacagtcctggaagactctttgtttatgataaagcagccttggaaatctataatcaatttcataattgcaaaaaattccattgtgtgtgtatatatacatatatatacttaaccaaggaagaaaaaaacctgtgcactaaaaactataaaacactgttgaaatgaattaatttctttattcatctcatctattgatggacttttaagttgtttccatcttttggatattacaaataatgctgaaatgaacatgggtgtgcacatatatctttgagatcctgttttcacttcttttggatatacccaaaagtgggatagatgaattatatgataattctgttttcagttttttgaggaacattcatacgatggaggctagcctttccccactgtgtagctttgttgaagctcaaagatcatatacatgaggttttatttctgggctctctattctgttccattggttcatatgtctgtctttaagtcagcatcatattgatttcattacaccattttgtaatatgttttgaaattataagtgtgaggtctcaagctttgctattttccaccccttcattctgttaatgtggtgtatcacattgattggttttcatacgttgaaacatccttgcattctagaaataagttccacttggttagagtgtataatccttttaatgtgctgttgatttggtcagctagtattgtgttgagaatttttgcatcagtgttcatcagggatattggtctgtatttttcttttcaatattggccttataaaaatgagtttgggggtgttcctttgtctttaatttttttgagaaaagtttgagaaggattagtgttaattcttccttaagtgtttggaagaattttccaggagagacatctggtcctgggttttttgttttttttttatggaaggtttttgattaccgattcaaccccatactaattttaagtctgttcagaattttttttattgcttcatgattcagtcttggtggattgtatatttcaagcaaatatctattttttttctaggttatccagtttcttggtgtgctattttcctcacttcttacagatctcatgtagtcttgtcagtctttccaaagtcttgtataaacaatttcacgtgcctgatttgctctcatttccccttgctttcttcagggaattgccaaattattcctgatgcaggggatataaaaccaatctgtaagcatttggagttttagaattataagatgaaaaaagtcacatttcaaaatctgacatatacttgatacccagaaagatgtttttgattttcattcacactgatgctgaatgcctttacatgctgtaatctgtgaaacagacttctttttaaccttcaaaccctaacagtgaaatgatgatgaaaactcaatctccctagattatatgtatttcagtttcttaagtcaaatggaatttctaatttaactgtagtctacactatatcatttccaatatcaaataattcttcctgaaactcaatataagaaaaaatgacaatattaactagtgtcatgaaagttcatgctgataatgagattgagtctggtccttcccctgggcttctccggggaaatgtcagtcgtctacccattctaattctctcacttggtcacagggaggcagtgagctccaccatcaagggacatgggtcccacttacagttaatggagtccgagagagcagatatttgcaaacccagtgatctgggctcagtggaggcctgggcaggtggagatgcctttggttgctgcttcagaggagtaagagcttagcaaaattagacatggagaggaatagcccatgaaatgtgtttggggaattctgggttaaatcaagtacagcaggtttctttactttatttttcagaactgctatatattaaggtatattgtaactgttccagaaggaggcttggtattcagcactttccaaactgcgttgctcatggaatgcctgtttttccccttagaacatcgaatggaatgggtgttccatgaaatgtgctttgggaaatgctgatgaatgaaacgttgctggagaatggtagttagagttcacttaccatccattccgcgtcaggcatttaccaaacaggctaccacatgctcctcacagagggctggaagagaggcatggctatcattgttctgtgttatagaggaggaaatggaggctttgagcaagtataccacctgcctgaggtagggtatggtggatccaggatccagatttatctgattccaagcaccttgtctttccccaacatctctggctccttttctgattcctaaaaagcccaaattcaggctggtgaacttgattgaaaagttgctatggaatcgtggggttttcatggagaaataaaaatgttcttcttatcctctcatcttatgaaccctcagtgtggcaggtgctattgagcaccaaggtgtctgaatagttgtgcaccttggccacttattctctgcacccccattttttcctgtaagcatgaggatcagcatctacctctaaggataatgtaaagataaataacacacattatgaaaaattatgaaaaactgcaatgatcacatagtagatgctgaataacttttgataacatggcacccaaaacagcggtttaataacatcctagcctacctgtgtcgccaatggccttgttccccagtactgttacccaaacctctgaaaagggaacccctgaccagagagctcctaactggggaacccctggccagtctgggtaagaagagtcactgacatgcacatcattgcaaaatgaaaatgagcttctcgttcaaatgttttaagaattccaagatagcaacatcaaagcatcaaactgagcatggggcccttcagagcacagggtcctgtgggcagccccgtctgtggtctaagaaaaagttaaaggaaaccagaatcctgcattaaggagaggagaaaaaagatgctgtcctggcaaggggacttcagcctagacagaaagaccctagctctctggaggggtcttaagggagaccccagcccccaagctgatctcttagattggagattggagagtgaagaggctgtcacaagatcttgtggtaggaagaaaaggtgttggcaggggaaaggtctgatggcgcacgctactgagctgaagtgaatgtgaacttggctggtggggcatcatgtgtgcggcccccagaggcgcgtgggtatgggagactctgcatcagggcagttagcctccaggtctggcttcacagtcttactaattaaatcaccccaggctcattccactgtgagattggaggttggcatatggcagattttccttggaggaaaagtgctaaatattaatagagaatatggacaaggcttgacatggtcccagctgctgtggttgggttgcatttggtgtaatttgggcaaagcccgttctctccataaactgaaactttcctctgaggttcttttaaacatgacttacaaacttaagctgggtgtcaaaacctgatgccttgtgcctatgagtgcttttactcctgacccatttccattctgctctttgcttaggaatatgctatttccaaattgctgcgtacatcacttagggaggaaaagaaggtttaattgcatagctttttagctgtggccaaagtaatagtcactagattcaaaaattctcatttatatgtttaatcaaaactatctttcataatggataaatttttcattcattagtaatttgaaaaagaaagagaatattttcagattgtggagaaactactatgaatgcctattttctaaaaatgtaattgtgttctttgaactatgtttaagaatgtccagagaggagagtgagcagtgccattacaggtgacctatgttctgctaacaagaagaggtctgaggtccctttagacagagagctctgcctattcacttctcacttacctattctttaccttcctcccaccttcccaccttgcctcctcccttcctccctccctccttccctctctccctccctccctccctctctctctttctttctctctttctttctttccttctctctttctttctttccttctctcctctttgtttttcttctgcttctttctcttcttctccttccttccttccatccttccttccttccctccttccctccctctcgccttcctttctttcccttcctttccttccttcacttcttccttccttcccttctttcacttcttccttccttcccttcccttccttcacttcttccttccttcccttctttcacttcttccttccttcccttcccttaccttccttctcttctcccttcccttcccttctcttcccttcccttctccttccttccttccctccctccctccttccttccttttatatatgcatatatgtgcgcatgtatgtatctgtatagatttttatctatctatctatctatctatctatctatctatctatcatctatctaactgtctatcatccatccttttgctgctggttcaaagaatgaatcagatacaaagtcttcttggaagtctaaaaaggacgtagaaagcatgggattttgagagattttgcataatgagagtcaaaaactgatcattccctttgccctgttttctcttttaggttcatatttggtgcttagacaaattcaaaatgaggaaacatcggcacttgcccttagtggccgtcttttgcctctttctctcaggctttcctacaactcatgcccagcagcagcaagcaggtaagagccagaaacgtccttgattttgtaaaaaggaatatcattctttgattttagatcttagacatcaggcactgacatagagcttagatatgttcttaaggtagctaagccatttattataggatagtcagataggatagttctaggatttataggccttttcagatactctttatccagtgagagatgacctatttttattaaaacttgggtttggtatcttggaattggcttgaaaatgatttgtttttacattggatgtgaacggaaagtttgtatctcaaatgttttaccacctgaagggactttccacatttctggcattggctggtctctgagcacataaagtagggagaagtcaatgattgagagtaaaaactattttccctgaaaaatacaaagatcaccctctctctctaactccagatgcaggaaggcatttttcatctaggatccttgaatctttaagatttctgtttcccaaaacgaattaaaagcatgggttctaattaactctattaagaatttgatttcagagttttagaaaagtgggaaatgcttcatgcattgcaagctggaaaggactcaggtgggtctccctctccttgacccagagagcttggcctctgagggattcttcctccaggccaggttgctcttagatggagggaagtctagtgtcacttcaatggaagaagaacgtgggttggggcatcaggtcagcctgaggtaagtagagtccagcagcaagcctggctcacagctgcagaagggcacctcctggggccactgacagcctgataccctgagctcccacccttgagggagaactgggttcatctggaaatgagatagataatgtttgacatctatggagacttttctggctctgaaaaatatgcagtaactaatagagtacagtttgttcatgctcaaaaaatctggaaaaaataagtcttttcccttctctacatttacacaagtcctcctcgcttaaagaacatgtatttattatatttatttttcacgcaaattacccaaagcattgggggttagtgaatggaaaatagcaatttttacttttccttttttgtcaaggcccggttttgtattccaaactaaagaatgaatttataaaatgatggttggttgtctgtgataagacttccttctggtttaatcaggtgggtcttggggctcaaactgccacagggaatcatacttgagttaaagacagcccaggaaattgtttccccaatctggagcatgctactggcccattcatgatggtctctgagtatggaacttgggctagtgactgggcaccagcagctattgagtgcatgggctcaggtccctggttcccaggtaagtgagtctaccttcctgtattatcagtgaggtgtgaagtgtttagtagcagtatagtgtaaaccaaatttgtttaggaaggctttgcattgataggaagtaattgcttacatagtagaaaaatctaaaccaatgtctttttttaaagatgtcaaaaatggtgcggctgctgatataatatttctagtggattcctcttggaccattggagaggaacatttccaacttgttcgagagtttctatatgatgttgtaaaatccttagctgtgggagaaaatgatttccattttgctctggtccagttcaacggaaacccacataccgagttcctgttaaatacgtatcgtactaaacaagaagtcctttctcatatttccaacatgtcttatattgggggaaccaatcagactggaaaaggattagaatacataatgcaaagccacctcaccaaggctgctggaagccgggccggtgacggagtccctcaggttatcgtagtgttaactgatggacactcgaaggatggccttgctctgccctcagcggaacttaagtctgctgatgttaacgtgtttgcaattggagttgaggatgcagatgaaggagcgttaaaagaaatagcaagtgaaccgctcaatatgcatatgttcaacctagagaattttacctcacttcatgacatagtaggaaacttagtgtcctgtgtgcattcatccgtgagtccagaaagggctggggacacggaaacccttaaagacatcacaggtaatggcaacgccaccaagctacgccctgccctgctgttcttgggagatgagcttggcaactgctggccttaaagcaacagctaggatggcgggtgggccagggaagagatgagtgttcacaggtttaaaaacaaaggtttgatttggaatattcttccatagtcttctccccaagtagggcattcacctacatacaagaagagtctttttttaaacaactaatattttcagtctaaaaaaacccacattctaatattatgatcccacaaaatacctctgccttccttagaaaagaaagcctcagagtggtgaggtgtgcatctgatcaaactcctctatttggtgttgggatctgtttcctttaaggaaagctccctgttggagagtgcgtgaactgagacgggagcgagggcatctgtttttgtgtccagtggactagcagagagcttctctcttctactttacggagttaatttaagagtgttggtagaatcggaattacaagaaacctcagctatgatccagtctagattgattttggaaaaaatttagtcctgaatggttagtgacagccggagctggaggctgtgcatttgggctgtgggtctggtcttcttatttcttctccatgcggtaatcatggctgtgcccacagagactcttctaattctaatggagttgatgagaaccactctggaagtattgagagcacacggacattgcatcgatgtgtcatgtgcagttgcatgtacagagctaattggccgacaggttatttaaccagttaagcctgttagctctccttccagggctaagtgcctaaatggccaatggggaaggaatttgacaagtacaatttcaaactctaccataccacagcaactgtaatgagtgcccagagcttactcatcagcgatgggcagagcagagggacctccccttgttagaaaatgagtccatgcagccatttgatagttggtagcagagaattctgggtggaatgagcaggaaatgagagaggaatccagggggagagttgagctccagaaaggagacacacatgttctctgagatggagggaaggcatgagaaaaggggctgtgtttccaagatattcaggtggataagaggcacattgagagagttcaagttgagttgacatccatcatctcaataaaggagggaagcagtggggcttgggggcttggagggattgaagttatttttgatcagctgctatagggatgtgaagaggggtcacaaaacattcaggaagcaactgctgatttgaagtggcatccagttgctatcagagattacaagtcagtgggtgtctccattagtgtggatccctgcctttctgcagatatctcaggcactcccaggatcaaaggagttcccagaactggaacttgcaaagagggaacaatagagaggacagaagaaaattttctcagtaaggaaatccagagtggtagctagtaaattcctgaaacagcctgccatggtgtcctagctgcatggggagctaatgagagctggaatgggccaggagacctctgaagagccagaggatgagaggccaggtctcggaaggagagtcctggagacagctgagtgtgcaagttggagacgctgctggtgtgtagacagggagacctctgagggccaatcgcggggctggaggagtttccaatggtgctcagtgtggtcctcagatgtgtaggaactatagagagccagccactgcagaaaccagagagggtggtgctcacaaaggttgtccatacagaccttaaagtctggagatgaccacagagtctgcagtgtgaacgcaggctgaacataatgtaactaaatcatgtaggaatgttggagactctcttctgtgtatttagtaggcatgaggaagtggataattctttgaatcaaaaaagaatgagtgggcaaccacatggcataggggaactgatcataggaagcaagatttatgaacagatttttctcctacacttttaaaaatggttaccaccaagatggccactgggacaggaggtaggaggtgaggtgactgatggagagtcagtctcttgtgaatacacatggatggtggggcaggaaaaagagagttgaggcttggaggcacacatcactctacaggaccacatcggagggacagcagaagaattgcaagattgcaatcagaatgctggagcagttgcagagaagcagtaccagatgtcagtttttcataacaaggattcagaaagcaggagctgaagagagatgacccaacatcagcagaaaggaactagctgtcttgagcaggcagaacttgatgaagaagagggtttcagaactagccagctccagggtgtttcagaagtttgttcataaaatggttttcccagtggttactcctgatttcagctttaacggggctggcagtgctgatgcccttacctgtgggtctgcttctccataggaaagagtgagaggcagttcaaacactgcaaagtgttccctgcttccaaatgacaggcctcacccctggcattaccacacaggcatcagtcctgccaaatgacaggaaaagctgggtgtctccaagagcaccccaaaccaaacactcaggttaccaggaaatgacaagagggtatctacaatgaactgcactcctcgctacgatagtctcagtatcattaattccctgatccatcacatttcggaatatcgggataataacaaagacctaccaaaaaatagtgaaaggggctcacgcctataatcccagcactttgggaggctgagacgggaggatcatctgaggtcaggagtttgagaccagcctggtcaacatggtgaaaccccgtctctaccaaaaatacaaaaattagccaggtgtggtggtgggcgtctgtaatcccgggaggctgaggcaggagaatcgcttgaatccaggaggtggaggttgcagtgagccaaatttgtgacactgcactccagtctgggtgacaagagtgaaactctgtctaaaacaaacaaacaaacaaacaaacaaacaaacaaacaaacaaacagtgaaagggaccagtagagaaatggaacatcttttattgacgttttgttatactcacaaaaatagctgagtttgcctttatgtttaaccattatgtaatggacaaacaatgagattaccatagtgaatgctaaatgaaactaccaacatcgtgtgtttccacacagatgataaaacctttgtttttatgccaagaaagcatctctgtcttctagtgtccaagccactagcagcaccagggcagaaaattaatccattcatgtgtcttttctaattaacatcactctgcagttcctcctagtaccacgtcccgctgcatgttccacggcaaaaacataggataataatcttaggaagaacagtacatctctgcttatagttttttggaaagccagttagaagagcattatagagattgctaattagttagggctgcctcttcttactacctgtctgctgggtaacttccccatagagtgttcttgattataaaacacacatatgtgtaaaatatgaacgatcaccactgttgtcaatgaactctactcaaataatcaatctctaatggttgtgtttttaaaaatccctctgtcattctttaaaaaaatgaatatacctgagatataaaacctttattttaaaacaaaagctaaaggtgacagggaggattttggcatcagctttcttttctctgtaaaggatgaagatttttaaaatttgtaaaatatatatacaattttgtgttttacataggaaacaagaatgggaacttgtttttcttaatgaaaggaggcatcacatgagctaagaaaggcattgtgcccacaccagtgagctcgggaaaagagcttccagggatgtcaaaggaaactgtgaattttccttggacactgtaaaacttttctgtagaaaacaccacagaggatgtgatacataaagcatagaagcagaaaaccagacaattttaaagcttttaaattgtgcatagatctgattccttgtaacattaacattggtcattggtccgccttgctgtacacaagcacacatggcccctgtgtgcccttgaggcttcagctctcttgaataacaaagcatgcccttgtatgtcccattattgtgtgtgtaagaggataatgttgttattcagtgatgacaaattatccaacgtgtttctatgactggccactgtagatgttcagtcttttacaagagaatgttcaaggattttccctcagggtccatttatcttatttgcatgactataaatttcaacccaaaagtaagttacaaatggagaagaaatagtgttatcctgcgacttagggatcatttttaaaagcttgactgtattgatcatatttaatccttcttttaaacgtcttgatatgctgaggaagtggcaaatccttccgtgtcctttgaggtcattggtttaggcctgggaaatgttgaggaattttgtggaatttgtggagcctctgtattatgcaatgatgtaggccatttctatggccttctgtgtaattcacaccccctggcaccacactctcttgaagatccttcaggaatcttatattttggctgaacagtggcaaatgctttgggccctaatcaagggcctagtcttatataaaacttttgtgtggcaattactaaaaacacaagatcttaattactgtagcacaacaattatcctactcattgtatcttataagaaggattgtgatagcaatgttgccaggttaatatatttccctatgcaaagaattaatctgcaaatatattgttaggaactttcttgtatattaggaagggaagagggcagttccgaacctggcaatctctgtttcagttcacacaatgagaagagcttgggtaagaatgtaatttcactagagcagaactcttcaattttgtgagacaagctttggatccttttctacagtgagaacaaaaacaattttgttggcacaaggaaacattaattttaaatataaaatgttcactgtcattgaaaagatcagagatcagagtgaatggtcttacctataatattaccatcatttaaaaatgataccctgagtgtagttttctggaatcccagaatataaatagataagctcaagctcacatataatctcttcttgtccctaacacatactcaagttatcaaaaacatcgactagaataattgtgctcctccttgagtttaaatcagccaaatttaaacattcgaactgatgctgtgaaatctctggccctgacttttagatttctcgatccctattcctccctcagggctgctatataaccccgttctcagcatcaggttgggaattctctgtttgccattatgggggagagaagaggtcttggtcagctgtttttctgccctttgtataaccccaggctaattctaatcagggtttattcgatgctcatggtccttctaggtaactagtttaggatgtcataaaaacaaggttggataattatgtcatgaccggtttcatatcactctgcttaacattgttctgcattaagtgactgaatatagaggcaatgacaaaataaatgaacaaaacatcctgcccaatcccagacctgcatttgagttttatgcaactaaacatcatttgagaaaaaagaacaacaaaaatttcatcaaagtattttttacatgaaaactttaaatgtagtttgagttctgattcacgaagttgcatgtacaaggtcattttggtttttaaagaaaagagaagaaacaatagtttctgaaggcatccagcaacatactgggttgaggaatcaccaaatcgtgactctgttttgtagctgtggatttgtataaaaaattattctaatcatttgaggaggcaggagaaatgaccaaaaattagaaatcatctctaaagttttggtaacctactcattgattttccctggtaggtttggtagtggacaattcatgctactacttttccctccaaatttagtggaaatttctagaatatgtacccaagattgtcccctcagaaaagtgaatatgatgtttggaaatttaactatgaggatggcacaaatgaaaaattgctataaatgtcccttttttacaccatgatttctaagaggttgcctcttatccattcagaatgcagaactgaaagagaatttcacattccttcatcaacatgtgttttgtttgcccatatttcgtgtttcttattggtttccaaagaaacatgtcagaacactgaataatgcatgtggtcacttgttctaatgctttcacattttttgcatttctttcttttaaagcacaagactctgctgacattattttccttattgatggatcaaacaacaccggaagtgtcaatttcgcagtcattctcgacttccttgtaaatctccttgagaaactcccaattggaactcagcagatccgagtgggggtggtccagtttagcgatgagcccagaaccatgttctccttggacacctactccaccaaggcccaggttctgggtgcagtgaaagccctcgggtttgctggtggggagttggccaatatcggcctcgcccttgatttcgtggtggagaaccacttcacccgggcagggggcagccgcgtggaggaaggggttccccaggtgctggtcctcataagtgccgggccttctagtgacgagattcgctacggggtggtagcactgaagcaggctagcgtgttctcattcggccttggagcccaggccgcctccagggcagagcttcagcacatagctaccgatgacaacttggtgtttactgtcccggaattccgtagctttggggacctccaggagaaattactgccgtacattgttggcgtggcccaaaggcacattgtcttgaaaccgccaaccattgtcacacaaggtatgtatcctcttctcaccatctgtgtgggagtggggtgttgtgtgtgttggtttacatagacgtaaggtgggtaccagcatgattcgccacgggagaagctgtaagtacccacagtccagtccttccctgatgagctgggtcctggatgtcatgtttgtgatgtcatgtgtgcggaaaaactaaagaccaatgagtgagtgaaagctcttacgagagtatgagttgctgagaaagcgtgcttttaaggctaattcaacaaacctgttgctttgagattattaaacatcaccgtattaactacttataatccagtcttcctaaaaatgggcttgaggggctcattacagttctgagaaagttactccaggactatggcattgagctctaaaagtcagtgttagaagtgtgctcatagacagagtatctttccaaaagcaaagatggagtgagggtgtctcctcaaagtcattttgtgctagggtgctgagagttatacttctgaaggtaagaaataacagtgtaatcacttgatgaaatatttatgaagttttttttttcttgtgcttgtgaagtgtaggagtaattctcctgagtggcaatattaggatacaagctcaaatggagggcctttggcaaaacagccaattggagtggtttaaaaaacaaaaaaaccaaccaagtcacataacaaatatgcacttaacaaacataggaggtatggtgggggcatcaggatgcatagcctcctctaccttttgaactgttttctgagacatcagtcacttttcagacctatcaatttcattacctaggtcaggccaataggatgccatttggtaaatcagggacacagtggcccccaacagtttccagaaacacccaactcacttccagtgttgcttacacactgggatgctctaatgagattagtccttgactataagaccttattcttcattttccttccagagtatgggctcaatgaaaattggtgaatggataccgaggctcctataagactctgattatcatctgcaaccaatcatctaaattttcttgggtgaaataacacattgttacaactcttatttgctaactttataaataaagtctgggtctacaagataaatattgtaataagatactgctttacccattgtatcaattacaattgatcaagggaggttttcctttgataaaggagtgaaaataatttaaaaataaccattttggagaatatgccattgtatgaaattaagagtagaagattttaaagtcttaattaaaaacatcactatctatttatttaaggagctgacctctacttaatagtgccttgctaatcattagttctagttgctgcattcatgtaaaggcaacacaccacatttccttacaagggttacaaaattcacactgagttagattgaacttgcctcaaatgattttaaaccacagcttttgttgtaataaaaattacaggtagaaagctcaggctatggcatctctacttaatctgtgcattggaactgtgaccaggtgatgtagcaagaaaagtatatgtgagtgttgccttctggagaaggctgtgtctggcatttatttaagtttgaaaggtcaattctgtgtggcttagcttttgctgcatacagttttccagcttttcctctcacttgatgggaccataaaattggcccaaatcctccagatgagctaatagagagactagaattttgaaaataatgttctgaatgcaaatggacattgagaagcaatggaaacagtgtacaggactacatgcccggtgcctggagctgctcatgctcattccatcatggtgccgttttgtgactctggcaattaagaaaacaatcaagtgaaaatttatgacctgctgaggtttctctgagcttgcatactattggtgtgcatcccaaagtatagaagcccagagatttccctatgttttgcagacaccgacgatgcaacatggctgtagatgggaaagctggtctctggtcttgggtcttctgtggacctgccatgtgatcctgggcaggtcatgcaacctctctgggtttcgatttcttgaatttatgacaaaggagttgcaccagatgaagatatgtctgtaccaggagaagtttcaactttttaatgaaaatgggcagcacatgacccttgtttcagattttccctagccaagtagagtttcaaccccttgattacaaacatcatgtttaatatcaatgattaacttgtaaatattcaacaaatatccttgactatctggcatgtgccagacactatgccaagcactagagatatggtgctgtttaatgagacagatgtggctgctcgtctgttacaggataatggggaaagagacaataataatataaactagtgaccaggcaaaatattctgagcatgataagttgcattggggcattcaacagggctgtgataggaagactggggaagggaattttagatcaggtggatggaaggccctgagaaggtgtggaaccgaaggcagatgagcatgcggagagcagggggaagagtggtccaggcagaaggaagagcaggaggggtggccctgcaacaagaaggcacttagtcccttcccagaactgtcagaaggcagtgtagctggagcacactggacagggagcctgaggttcagactccctggatgcatggaagctggagaagcagctgctgtagggggatgagaagccacagggagtggagcctgtgggttgggagccaatggcagaggaaggtaggctgtgggttagtggtgggggcaggggctctcctctgagggcttctattttctcagagacagatgaggaggccttggaggcagtggcagagggctgagcagagagcacagccatgagacagtcattctggaggacaggacagccaacttcccaaggaggcatgggaggatggtgggcaggcacaggtctcctgatgggggtctggagttccgagcgtggcatgcaggtaccttgttgtgtggtcttctccaggaatgtccactgcttgggtgatgcatgaggaagactgtgggcctgatggaggctttcaggagagtctgatggaggtgcagggatgaggcatggaggaaaacagagagaggcgtgggaggagggctgaagagggttgtgccatgttggtgaggagtagcaggaccttcaagttcatctcccaacaaggcagtgaagtcaggccctgcagagccacattaaagagataagacagctgtgtttgggttgatatttatgtcaagtggaaggaaatgcgtatgcatccctgacgtggctcacagaagagtcagctgtgagaatcccaaggtttttatcactgggtcagaggagattcatggtgcagcccccagagaaatgaaatgattctgcaaagcctaggtgaattgcgtcagagtcatgaagcaaacataggaattcagttattcttccagttactcaatatttttcagtgtttactatatttggctaagcatggttctaggcatatcatctgtcatgagctcccatgacttgaataaaaatcaaacgtaaatgacctcttacctaatcaaaggggactctgggacagagcctctgggaaccagaggtgcatttcagggttcccagagctgaatccttgttgggtgcaaggagactaggccacttgtttcattagatctagaaggtattccttcccgctggctcatcgggagaacttttagtgatgcagtggtagggggagggaaaacgtgggagggtaggggatgatatttatcttctcccaccccaagagttgtgccattgctggtacttataaagaagaatataacaatctgggccacttggtataggagcaagtagcttctcaggtcattgttatatgagtatttgtctatttttctgtcatgtgtgatatacatagtaaatacatgagtggtagattcatggtatagcatatatggaatttatatgtgtctatatacgtgtatgtgtgtatctatatacatatatattctctctaatggtacaaaggtataagtcttctagagatctacacattagttttatctgcaaagatattttaaatcaaaatgaaggggtagcccagagagacagcatgttctaaattaaatgaaggaaggaaagcccagaatggatgttcataacaatgaccatgaaatattgagaaaaggttcaatgatgttctgcacacattgttacaccagtaggcaactgtgttattgtattaaggacgttggtgcataacatgttacccttctcttagaacatagaccttgtcttgatgctacaggtgagcacccagatgaggcactgctgtcttcatttggcatgtatcagcgattctcaccccaggcatcacgctcccagcttctggtccaaacaactagaaatgaactgcatttcaaaaatgtgttctaggctggatgtggtggctcacccttgtaatcccagcactgtgggaggctgaggcaggtggatcactcaaggtcaggagtttgagaccagcctgaccagcatggtgaaaccccatctctaccaaacaaaacaaaacaaaacaaaaattagccgggcgtggtcgtgcatacctgtaatcccaactactcaggaggctgaggtgggagaatcgcttgaacccaggaagcggaggttgcagtgagctgagatcatgccactgcactccagcctgggtgatagagtgagattctgtcctaaaataaaaataaaaataaaaatatgttctagaaggtagctctgattcttagaaagttcttccttaccttcatcccaaactttgtttcctttgtctgcttttacaaaatcaacttgccatgcaatctatctgatggaatacagtaacagaggactcttttgcaaaacagtccatctcaggtttaatcatttatgttcctctacttcttggaatctctgtcaggtttttgggttaggtgttgtggtcttaacagagttcatggttcttgcaatatgggcagggtgcctgcacatggatacagcagttcacagtcactgtgagacagttatcttattgagatgtttttgctttatggtttgcctttaagttatcactgtcatattacttaggatctttaaaaacaggttttttgttttttttttggagatgaaatctcactctatcacccaggctggagtgcagtggtgcaatcccggcttactggaacctcctccttccaggttcaagtgattctcatgcctcatcctcctgagtagctgggattacaggtgtctgcccccacgctcggctaatttttgtatttttagtagtgatggggtttccccttgttggccaggctggtcttgagctcctgaactcagatgatccacctgcctcagcctcccaaagtgctgggattacaggcgtgagccactgtgcctggccaaaacgcaggtctcttaagtgaaaaatgtttgcggcacttgctggctttgatgctgatttcctttttatacgttttatgttaagtaattctttcgtctgtcaaatgaagacagggaatatagaactgaagagaacagggatgtgcaggctctttcagcttttgcacttgacaatgagcattttgaaatgaagactgtgaggcaaagggttctctgagcagacatcagtggtttctttaattattcaagcaatgacttcactctggccaagttgtgtatttacggcagaagagaacttattgaattttcagtgacagcatacaaaacaggtggctactaaaactaaatttgtttttgtgcaactattttgtaaaaagtactgactgggcagggtggaaggtgagccagctttcctccagcaggtggggaggcaaccataacttatgtgttcattaggacaaattccctttggggtggccctgtggtcacgttggccacagtaaatgagggtgtcctttaaatggagttagctttgttgaaagtcattgttgattgtgcttggtaaggccattctaattgccttataatgttgccacctacagtcattgaagtcaacaagagagacatagtcttcctggtggatggctcatctgcactgggactggccaacttcaatgccatccgagacttcattgctaaagtcatccagaggctggaaatcggacaggatcttatccaggtggcagtggcccagtatgcagacactgtgaggcctgaattttatttcaatacccatccaacaaaaagggaagtcataaccgctgtgcggaaaatgaagcccctggacggctcggccctgtacacgggctctgctctagactttgttcgtaacaacctattcacgagttcagccggctaccgggctgccgaggggattcctaagcttttggtgctgatcacaggtggtaagtccctagatgaaatcagccagcctgcccaggagctgaagagaagcagcataatggcctttgccattgggaacaagggtgccgatcaggctgagctggaagagatcgctttcgactcctccctggtgttcatcccagctgagttccgagccgccccattgcaaggcatgctgcctggcttgctggcacctctcaggaccctctctggaacccctgaaggtatggtggtgatggcttcagacacacaatggggtggtctccaggcagggcctttaagaacaaaacaaaatgaagtgtgtttgtgtttagctaagagacaacaaatgatgaaaacagcagcaacgaacatgatttattccaggtttccttttgcactgggttcaggattgtatggtttacaatgtcatgcaatgaaatttcatataagaaccatatgatttaaaccacaggaccatgggccaccacctgtctttgaagcttctggccgaggaggtcacatctcagttcttatcgcttgtcagatccctgtgttcttctgtttctactggtgatttctgtccagtctcctcctcatcaccaggatgtagctttcctttcctgagttgtccatctacttctaaacagccccagtctgagctgtttagggcacagtgtcctcagcttttaatccctctcttctctctcgttaagggattaccctcaatgggaaagcatattgaatggctaagtgtggagttcaaacctagtggttcttcaaatccctcatttaatatgattgccagtggagagttatttttaaagacattatacagatctatgagctaatgagttgaagaaatacaattcactgcccttaatgaagagaagatgagcatcacagaatgatgctttcccaccttgcagactcgatcactagaggattgcctgatgcaggcatgacccatgctgcctggatgcatgctttctcttcacactccctggtcttctatatccatctctttctctctcttttaaaatttttcttaaaacttttaatccacactttcatagccaaagttcaacttaggatacaattagttgtgaggtctaaattacagtagggcatcagggaagaaataaaaaataaaattttaaaggcacatggtaaatgtgttgggtcaaatacactattttgagaattatactttttattcttgatgtgtataagtttggccaagcctagcaactagtctccttctattttgctgtgtatttacggtcccatcatctcactttgggggaattcccctgttggatgattgcctagcaagactgtgacttcctaataggagaagagtcccagtggagaatgacaaacggggaagtctgaagaagacttcaatatgagaccagcctacttttgctattttttttagccttaaggaactcgttttctcaggttagtgagggctaactgcttctgagctatggatggaagaccctctgtttgtgggtagaggtgagccccagaggatccagccaggcaaacttaaacctggctgggatgagtgatatggactgatgcagcaccttcatagtattcatttttagggaaggagtgtttggtttcaaggattctgatcacttttgttgtctgtaaacattctaactttgatgttgtagctctctttgagccaacttggttttgtaaactcggctaccaatatgtctcacaaacaccagccaccaccagaggaaaatatgcagccatctgccatattttacaagatggacatgctttgccatgctgactttctctgtgttctaaatgttggcatgtgtgcacgtgttgtaggcacacatgataaaactctccgtggttgtgtatgtctcacttttttttctgtgcttcactgcagttcactcaaacaaaagggatatcatctttcttttggatggatcagccaacgttggaaaaaccaatttcccttatgtgcgcgactttgtaatgaacctagttaacagccttgatattggaaatgacaatattcgtgttggtttagtgcaatttagtgacactcctgtaacggagttctctttaaacacataccagaccaagtcagatatccttggtcatctgaggcagctgcagctccagggaggttcgggcctgaacacaggctcagccctaagctatgtctatgccaaccacttcacggaagctggcggcagcaggatccgtgaacacgtgccgcagctcctgcttctgctcacagctgggcagtctgaggactcctatttgcaagctgccaacgccttgacacgcgcgggcatcctgactttttgtgtgggagctagccaggcgaataaggcagagcttgagcagattgcttttaacccaagcctggtgtatctcatggatgatttcagctccctgccagctttgcctcagcagctgattcagcccctaaccacatatgttagtggaggtgtggaggaagtaccactcgctcagccaggtaaacctcccctgttgccgggaactccctctccttcctcagacaccaccctggagggtagtttgccagtctgaactcaagagcactgtggactgtacaaagacaattggctcccttccattgaaatagtttgaatggggacttgagacactgtaccagcaaggctggactctgtctaaagggtgttcacgaaggaaagtctagaacatccagcttatgttctgtccattttgcctcaccctttattcagaaggattttttttcctctaatgactgtgaggattctggagttcgaatccagatttggggatcatggggtggagggagacagagagagatttttcttacatgaatatgccttgggattatttaaacgttgaaattgtatttttacatgatttttaaatgttcaacatctgctgtatctagaaaattatttgttataaaacaaacaaagggtgcatcttcatgcaatggtaaaatggtttctaggggaaggctaacttattattattattgcaaattattatggtggtaagatatggttgtatcagatctaccagtctgctaacatcacacagatgaatggcaagactaaaccaattgaaacctaatcaaaatagttctaagaactgttttaactgagaatgttatttacattacacattgcggtgccatagggcctgtcatctgtgtttcctattgtctcattacaacagattgggaagcattgacaaggagcctgacccacacagcagtaatgggcactattgtgggtcttggcccgtaacctcaaatttaatgatttgatcattcaattacagcagattcatggcaacccagttatctttgagtggttgacccatatcagccccccctttttttttctagagattgagatcaatttttttaagcaaaggtatattaagggccatgttttcaatacttttatttgtaacagtttgaaactgctgtctgttttcctggagcgattgccacctgatgtaagaacacaacccagtggggcttttccctggcttgctttattgaagaagcatgatgctagatgggataggctgttctagttactagctttgcaaatatgcactgatttgaaataggacattttcaagacaagtggtatgaatttgggttttctcttctcttgctggcacagtggtcatcagatgagtttcaccaactcctgttgtcaaatggtgctgggctgaagtcgctttggttcctgttatgctctcgtccctcattgtatcctaatctaccttcattgcagagagcaagcgagacattctgttcctctttgacggctcagccaatcttgtgggccagttccctgttgtccgtgactttctctacaagattatcgatgagctcaatgtgaagccagaggggacccgaattgcggtggctcagtacagcgatgatgtcaaggtggagtcccgttttgatgagcaccagagtaagcctgagatcctgaatcttgtgaagagaatgaagatcaagacgggcaaagccctcaacctgggctacgcgctggactatgcacagaggtacatttttgtgaagtctgctggcagccggatcgaggatggagtgcttcagttcctggtgctgctggtcgcaggaaggtcatctgaccgtgtggatgggccagcaagtaacctgaagcagagtggggttgtgcctttcatcttccaagccaagaacgcagaccctgctgagttagagcagatcgtgctgtctccagcgtttatcctggctgcagagtcgcttcccaagattggagatcttcatccacagatagtgaatctcttaaaatcagtgcacaacggagcaccagcaccaggtatggtagagaaatgctagttgctctgccactcagttctctaatgcatgagttgagggtaggctgctggccactggtccttagatagaagccctccttgagtttacaggaaaggtggaaaattaatcacctgctggtttcagcaggaacaatagaatatgagatgtccctccttactttgattctctagctgctctctcaggagaatgagggtgagtatttttaagggcattagattatttcatagtaagacatgttataaagatttagatatcagtggttaaaatccttttttaaaaacagtttttatggtatgcataataaaagccatatcatatggttacattgtacctaaaacagccttcatcttcatattcacccaatgcctttatattgttataattccttcattacattcattaaaaattaaaggagtagaagaggtagataactttccaccataaactctgcattaaaatcccccaactgctaattgacactgccatgacttttcatttaacccctttaatttagtgataaaaatgcagtgaagagagtaatttcccctgtatgccttttgatgaaaaatgaagactccagagcctctcctttgattactgggcccattggccgttggcttgggatggtaactccgacatctgggttccgtttcctcccattaacccacttgtgacttgcagcaactcaattgaaacctcccatcgataaaatgctagtggttgtgcaggtgctgccatctcatgtctctcctcccatcccaagttttttcttgaatacatctttgaaagctaacaatactcttcaagcattgaaaagttccaaaataaaaggggtccctatattggtgtattagtttcccattgctgttataacaaagtaacacaaatttagtggccaaaaacaaaacaggccgggtgcggtggctcacacctgtaatcccagcactctgggaggccaaggcgggcccattgcctgaggtcaggagttggagaccagcctgaccaacatggtgaaaccctgtctctaccaaaaatacaaaaattagctgggtgtggtggcgggtgcctgtaatcccagctactctggaggctgaggcagaagaatcacttgaacccgggaggcggaggttgcagtgagctgagattgcgccactgcactctagcctgggcgacaagagcgaaattctgtccaccccccgacccctccactgcaaaacaaaaacaaaaacaaaaacaaaaatccttattatctgacagttttgaaggctggaaattggaaaccagtgttgctaagctaaaatcaaggtgtcaacaggctgtgttctttctgcaggttctaagggattcttcatctgctcaccttttccagcctccaggggctgcctgcattccttgcctcctggccccatcctccatcctcattgccagcagcttggcactttctctcctctctgacttctgtttccatccttacatcttctctctaactctgaccctcttaccccctcttataaggacacttgtgattgattacattgggcccacctggctaattccagggtaatccccccatccccaaatccttacctgaatcacatctgcaaagtccttttctcaagttcggggatttggacttggacatccctgtgatgctcttatgcagcccacctcgttgatatgaaattgctgctctgatgtcctgtgtgagttaccaggctgtcctcctcccagtttcaggtgaaaaggacgtggtgtttctgcttgatggctctgagggcgtcaggagcggcttccctctgttgaaagagtttgtccagagagtggtggaaagcctggatgtgggccaggaccgggtccgcgtggccgtggtgcagtacagcgaccggaccaggcccgagttctacctgaattcatacatgaacaagcaggacgtcgtcaacgctgtccgccagctgaccctgctgggagggccgacccccaacaccggggccgccctggagtttgtcctgaggaacatcctggtcagctctgcgggaagcaggataacagaaggtgtgccccagctgctgatcgtcctcacggccgacaggtctggggatgatgtgcggaacccctccgtggtcgtgaagaggggtggggctgtgcccattggcattggcatcgggaacgctgacatcacagagatgcagaccatctccttcatcccggactttgccgtggccattcccacctttcgccagctggggaccgtccaacaggtcatctctgagagggtgacccagctcacccgcgaggagctgagcaggctgcagccggtgttgcagcctctaccgagcccaggtacgcagggaactctttgcatcctcactcagtgtcattgtctggggctacttgtctggactgtgggccacaaggtgttctcaattttgcttttcctgccatgtgaagtgaaaactaaaattacaggaaaatttaggaacccacatgccctttttggcctcgatgggcagaaatggcagaggttcaaggggggagatgctaagattcatgttttggggcaaattaaattctccaaaagggacatatgtgcagcttggaattcaggactccttaactttgcatgaaagcttctgtctagatatccaaagggaggggccgtctaactgataacgcctgttgcgtatcagtcctgcgacccctggtaggtttggtcagcagccttctgtgaggcaggaaggagtctgaccagggacactctgcaagctgggacatagactctgaaatattggtatctccagagccaaggtgtgaagataattttgactttgcttggtgctgagaagtgtcttaactggcaggaaggccacctggctcttatgaccatagtttattctattttctttttcctgttccctctttctaggcctggtacaataaactaaaaaatggtgggagccctggtgctgagaaggaaggaggaaagatatatctacctctcaataaatgtcctccaagggccactctcccgggtcactcgggtggggggggttcacagtggcgaaggaggcagatgcggccttgctccctcatatgcactcacttgcctgctcttccaagaggagagaaaagaaggaaagttggggaggagcggaggaaggagtaaaagcaagtgaaaggaaatcactgcaggatacagtgggtgatgagggaggtgaggatgattatttgggtgcaactgagaggggcttggtttctcctcgctggtgcctggggaagagagcagtgtggcccaccaggtttctgtgggatgttcctgagcatttatgatcaggtaaatttgggcaacagtgggataaacaaagtgaaagaggctttctttcttcctaactaaggcgctttgtgtgtctccaacacaagaaaggaaatgcaacatttccaaaatgtatctgcctgcaggaggcctctgtgatgctgtgtcttggccccagattgccgaggatggactttgggaatattgtcacagtgcgggtgcagcttctgttgtcaggaacgtacatttccacaacgctgtggctctttgcccactcactctcctgcgctccagaacagcctccctctttcccccttctccccattcggaggcttctctcacacctctcctgacccacctgactctcagctggtaatcttgagtcctatttctccaagaaaatgcaagtaaacccaaagagagctgtccccggccacgtcatcccgtggttccttgggtggcctgtctccgcttcctcagctccctttcctctcacctgctcagtggcaccatctgcagttccctttcttgctcttgtgtcaccctttctccactgtgctggatggttccatccatgataaaatgcattgcttcttctctcttaaacaccctctctgatgcgccacttcccctgccagcagcacctgtctcctaaagacttatctatactctaaagttcctttcctcccatcctctctgagcccaccctactttgtcattcacccttgctcctcccccaagtgctccagttgaggtcactccatctgacaaggtccctgtctctggcgaagcccagtggctgaccctcgggtccctgagcagcacctgatgcagtgcaggtcacgtccttcccaagtaccatcctcgctggtgctgatgaggctcttctgattctgcctccgtcgggtttttcatcctttgctccccttctctttgatgtgtaaacactgaaatgcccaggactcccacttcttggacttttaacagtggtgattggtgttaggatcccctgcctgtgaatccatgacaaactgggcggtggctcatgaacgctaagaatttggtgacgatgaaggtgaagccatgctcacatttgtttcgcaggtgttggtggcaagagggacgtggtctttctcatcgatgggtcccaaagtgccgggcctgagttccagtacgttcgcaccctcatagagaggctggttgactacctggacgtgggctttgacaccacccgggtggctgtcatccagttcagcgatgaccccaaggtggagttcctgctgaacgcccattccagcaaggatgaagtgcagaacgcggtgcagcggctgaggcccaagggagggcggcagatcaacgtgggcaatgccctggagtacgtgtccaggaacatcttcaagaggcccctggggagccgcattgaagagggcgtcccgcagttcctggtcctcatctcgtctggaaagtctgacgatgaggtggacgacccggcggtggagctcaagcagtttggcgtggcccctttcacgatcgccaggaacgcagaccaggaggagctggtgaagatctcgctgagccccgaatatgtgttctcggtgagcaccttccgggagctgcccagcctggagcagaaactgctgacgcccatcacgaccctgacctcagagcagatccagaagctcttagccagcactcgctatccacctccaggtgagatgggggcgtcggaggttctccttggagcattttccatatgaaaaataacaggctcaaaggccatggtactcataataaattaaattaaaataaaggttgtatgcccttacctttatggtttttattttgagacagggtctggctctgtcgtccaggctggagtgcagtggcatgatcataactcattttaacctctgccttctgggatccagccaacctcccacttcagcctcctcagtagctaggactacaggttcataccaccacgcccggctaattttttgtattttttgtggagacggggtttcaccatgttggccaggctggtctcaagcccctgagctcaagtgatccacctgctgcggcctcccaaagtgctgggattacaggcctgagacaccgcgcccagcacctttatgttcttcatgcccaccagccagaccccaccaggacacacctgcgactgaacaagttgggtctattgctcatggcatccagggagaatgcataccgtggcaaagcatgagggcatctccataggagggtggccggaaggactggggggacttgagctagtggcaggtcattttgtggaaggcttaaagaaatggaactgtggcctggattggatgttgtcaagacgtggaggtgattctgtagctgtatcttaagtcttacctagaagcaggatggccttggtatagattggtagagaagagcagtcactcttattaaccaggacagggagtgtttttgtcctttttgtggtttgcaccatgtttttctttttgtctgtgttcagatagggttacaatgtggtctcattttcatcttgccccattgtgatcacagagtagccttgtctgttgtgggggtcctgtgagatcatgtgtgctcaacaggagaaccccaaggccatgtgtgctggaccagctccccaatgcgggggctgattctctctttcttaaacagctccatcacaagagctgctcagcttccactatgctgcatttacaccgtaaattgcccaattgtgtatgaggcaaagggcaggttgaaatgtgtggagtagcaacatacaagtttaataaaatagcatctgaggagtacctaaaattctaactaataggaaaatgtggctcatctttctcaggatcttttgattaattttattgttaaaaatgcactaggctgggcgtggtggctcacgcctgtaatcccagcactttgggaggccgaggtgggctgatcatgaggccaggagttcgagaccagcctggtcaatatggtgaaaccccatctctactcaaaatacaaaaattagctgggtgtggtggcacacacctgtagtcccagctactcgggaggctgaggcagatgaatcacttgaacctgggaggcagaggttgcagtgagccgagattgcgccactgcactccagcctgggcgacagagcaagactccatctaaaaaaaaaaaaaaaaattaaaccagttatttaatagaattaaatatttttaaaaatgcgctaatgtaaagaaaatgagtcagggtgggtgggggaagctgggcatggcggctcatgcctataattctagcactttgggaggctgaggcaggaggatcacttgggcccaggagttcaagaccagcctgggcaacacagtgagaccctcatccaaaaaattaaaaaaaaaaattttaatgaaatttaaaaaataaaggcacaggcatggtggttcatgtctgtagttccagctacttggaggataaggagggaggattgcttgagcctgggaggtcaaggctgcagtgagctgtgactgtgcaactgcactccagcctgggagatagaaagagaccatgtctcagaaaaaaaaaaaagaaagaaaaggaaatagaggaataatagtgaaaaataaaaacttcatataaatgctagagatgtgtgagcaaaaaggaaatacgagggcacaaatgcctggggagcattaatgtgaccccttggatatggcactgtgttatacgtaccctgcccccatgggctgagattgcgcagcatgctgggatggtgttgggctcctcaggggtctcacttgctaagtgatggccttggacaaggcgagaacctttggcctcagctgtttctcttcttgtacaacaaagatatagatcccagtggccttggtctcttctggtagcaacagttcatgattctgtagattacggtagcccaagattgatttctaaatgctccttacattttagaaatcagtagtaacccagaccacaatgccaaaatttaaatagagtaaattcagaaagacacgttttggataacttcaaatatttcaaggagcagaaattgttttggtgtaaaaggtccaatttttaacggctaatttcaaaaagcccgagatacaaacaacacaggcatcttgggatataatcttaaggttgattaggattatggtgcaaggtgcacaccaaacctgggtgagggctacttacacactgaatgtttccctttttcttctttgatctgcagcagttgagagtgatgctgcagacattgtctttctgatcgacagctctgagggagttaggccagatggctttgcacatattcgagattttgttagcaggattgttcgaagactcaacatcggccccagtaaagtgagagttggggtcgtgcagttcagcaatgatgtcttcccagaattctatctgaaaacctacagatcccaggccccggtgctggacgccatacggcgcctgaggctcagaggggggtccccactgaacactggcaaggctctcgaatttgtggcaagaaacctctttgttaagtctgcggggagtcgcatagaagacggggtgccccaacacctggtcctggtcctgggtggaaaatcccaggacgatgtgtccaggttcgcccaggtgatccgttcctcgggcattgtgagtttaggggtaggagaccggaacatcgacagaacagagctgcagaccatcaccaatgaccccagactggtcttcacagtgcgagagttcagagagcttcccaacatagaagaaagaatcatgaactcgtttggaccctccgcagccactcctgcacctccaggggtggacacccctcctccttcacggccaggtatgcaccgtgtgacccatgactacagagtgtgacatcaacattttttttttagttaaaaaagtaatcagtagtcatttttaataattttcttctctctgggttgtttcttcagataatattagaaattaaatactggaaaagtagttccattgaaattgcagaaggaagcatattattgatcttccatcactcctgagactaatcatagccccattgaaaggttctgcagtgttgcactgagataattacaaactcattggctctcagaataggatggcatctttgaaatcagccagtccatgccccactgaatgtgactttgaagttggcccatgcctactggccagatgcccaatatagtccaggtcccctcattccttggcctggtgggaccatcagggagcaccttcctggaagacttgcagtcgtccacctcagcttctaccccgtgctcctggttctcgtctttggggctgcaaaagcaaagtggatctctccaccagcccatatttttctttgtccctcctccaagtaatcgccatgtagacatctgaagcaaaccattagggttggttcttcaaaggggagcagtatgcctgtttccctagctcactgctccctaccaggctgcctgtggcacatctcacatccctcacactgtctctcatcctttctcctctctattccagtctcagttgcttaattataatcaagaaattaccctccacaccactgatattcagccagctcctacaaagctctcagaccatcatccaaaggttaaggggcctcttcctattttccaatctgtttctcctagtccttccttgctttgcacctcacacacatctcttcacttccaggaactatttaaaattcttgaccacaaaggaaacttctagtggcatttcctaaaacacttgagatcacaaatgtcaaagccaggtccctattgaattcttgtcacaatgccattttgcacgggataactgaagttctctgtcactgagttttcacagagtgtgacatcaaataatttttctcctttcctttttgtttagaggatttatcattcatcttcttgtatttagcatgtttgggagctgcaaattcaggaactacaggctaaagaggcatggatttgagtgaaggtttcactgtgaataaattattaggaatgtcttatttcagttatttaattttaccttttgtgtatttatgttctgggtctggaaacctaatctctccttattttcactttaatcacttctagagaagaagaaagcagacattgtgttcctgttggatggttccatcaacttcaggagggacagtttccaggaagtgcttcgttttgtgtctgaaatagtggacacagtttatgaagatggcgactccatccaagtggggcttgtccagtacaactctgaccccactgacgaattcttcctgaaggacttctctaccaagaggcagattattgacgccatcaacaaagtggtctacaaagggggaagacacgccaacactaaggtgggccttgagcacctgcgggtaaaccactttgtgcctgaggcaggcagccgcctggaccagcgggtccctcagattgcctttgtgatcacgggaggaaagtcggtggaagatgcacaggatgtgagcctggccctcacccagaggggggtcaaagtgtttgctgttggagtgaggaatatcgactcggaggaggttggaaagatagcgtccaacagcgccacagcgttccgcgtgggcaacgtccaggagctgtccgaactgagcgagcaagttttggaaactttgcatgatgcgatgcatgaaaccctttgccctggtgtaactgatgctgccaaaggtaactcccattatgtgcatattttccatcctttcctgttgacatttgtgcctctttagctgtctggtccctggtgctgacctctggagtccttaggcatttggttgcttcatacatttacttatacccactgggactggtcctgacacccacctcaccactacctagggcgttcttccaagacaagagtagaagtctatcatattttgcttttataagatttacttttctcccctattccttaatccctcaaacaattcagatttattgattcctgtgtctaattatagatttattagatcaagtatttgagatcagaatatttgattttcaagtgcttttaatttaaagcacaaacttggggtgcatctaaacaccagtggtgtatcatcacaccaaagttaattaacaccaccaacaaagctgactttttaaaatagcttactatttggcacctaacagctaccctcatttctctctgtgagaggggtggatagaattgcttctcaaagctcacacacacaggatctcattttgcacttgagtgcgatgccctggtcctctgcctgggttgtccctactgctggtataagtagagttcgtctcctcagccccagctgagaactcatcacctgcatttctcctttccagcttgtaatctggatgtgattctggggtttgatggttctagagaccagaatgtttttgtggcccagaagggcttcgagtccaaggtggacgccatcttgaacagaatcagccagatgcacagggtcagctgcagcggtggccgctcgcccaccgtgcgtgtgtcagtggtggccaacacgccctcgggcccggtggaggcctttgactttgacgagtaccagccagagatgctcgagaagttccggaacatgcgcagccagcacccctacgtcctcacggaggacaccctgaaggtctacctgaacaagttcagacagtcctcgccggacagcgtgaaggtctgtggggccagttggttcaggtgctccctgggaaatttccaaatttttactggaaaggaggaagcccttcccccaagttaaatcctcttcatgtttcactggattgttagtgtctatatggaaaatcccttagttattaactgatctaatgtcatgtactgtcttcctcattttggtagtcttacgtaagctctaaaagaatcctggaaatcagtagtttaacttgaatgagttgaatttgtgattgatttatgtttaattatagtccagtcaggtacgttctccactttcatttctctgtgtgtatgtgtgcatgcatgcatgtgtgtatatacatgcatatatattgtgtagacacacacaccatgtgagtttgctagggatcatcatgaagtactacagcctggcgggcttttggaacagacatttattttctcacagtcttggaggcttgacatcctcgaggtgtcggcagggctgtttctcctgagtcttctctgcttggcttgtaggcaggggtcttctccctgtgtctccacatggctttctctctgtgcatgtctgtgtccaaatctcctcttctaaaaggacatcagtcatactagattaaggttcactctaaagatctcattaaccttaattacctctttaaagaccctatctccaaatacagtcccattcttacggtactggggtttaggacttaacatacaaattttgaggggacacaatttagcccataacacatgcacacatgcacacacgcacacacacccacagacatgcacccacacacatgcacgcacatgcacccatacacatgcacacacatacgcacccacacacatgtacacccacacacccacacatgcacacacacgtgcacacacatgcacacacaatgcacccatacacacacatatgtacccacacacatgcacacacatgcacgcacacatgcatgcacacatatgcatatgattcgcagaaactacatcttagaaatatgagaatgagataaaaattgtttttattgtcattgctgcttgtcttttttaaaataaattaagcactcaaatatactcctccattttaagtgcaatatcaaagtcttgtgaacatgggtaatcattcctcaacttgggccctcagtttccttaagtgtaaaatgaagggcttgagacagcgagtctctcagttttctatcagcagtctgcaacactcctttttagttttcctgggatttgacagctctcttatctgcaggtggtcattcattttactgatggagcagacggagatctggctgatttacacagagcatctgagaacctccgccaagaaggtaggtgccaaggctttctaaatatgagaagtaaaccctggtgaggcggggtgtactgctctgctggagagaaacctctctgctaatgcagcgccccaagggagcagcgttgtcttgggagactcttcctcccagcgttgtggcccttcatcacctgcttggagctgtgggatggagctaacaaaaattccttctgtacttagacagctttactgttgtgttgtggctgttcaggtggtagaatgttcagaaagcatgatgcttttgcaaaagatcatgacgtattgattcatttaacttcatcacataaactaggaattagttactaataaaaatacattgctctatttttggtttgcagttatcacagttcaacatttaataacactacacccaaataatacaaagaaaataatgtaagcaatgacgtaccaaacataaggtgacagccatgcctattatcagatgtgatctttgactattcacttgctttggcgtttggtagcactgactatcagaaagtggatgccattacagaagtgtaatttatcctaagaactttctatttattagcttacttttcccaagcaatggagatgaggctgctattatctgattttggaggtgttagtatttcaatacttcccacagcatactcgtgttacagagggcctgagtttgagaactcatgcatgaatacacttcatggatgccacttcctatatttttagtaataggtttagttattgacataccggaaacaattattcagcagagtccaaagtttgagtatttcaacaattcagagtagccagtaaacttgattaaatatatttaagttaaaagctaaattttacactgaagttttctttaaaaatgtagtcaggaaaaaaggacattgcattttccacatgcctaggtgagctgtattaaatgtgtctttctttgcaggagtccgtgccttgatcctggtgggccttgaacgagtggtcaacttggagcggctaatgcatctggagtttgggcgagggtttatgtatgacaggcccctgaggcttaacttgctggacttggattatgaactagcggagcagcttgtgagttttttttatgtctttatacacagaccagtgtagataccacaccttttggcatttcaagagaatgaagttaattatcagcaggtgaatggaggtggggggggggccttggtagatagttaaatttatttaattcacttgggaactgccttgttgccataacacatgtgaatctggaaatggagatagcaaatcgctggaaatccagcgagctggaaggggatcctgggcgcgctgaggttgtggccttagcattttctctgctcccttagcaacggcctcttttaacaccattgcagggatgcaaaccatcgagattgtccatcctccaattggaaactgtgtcaagagcatctgaaatcttgcatgataaaaacaacatgcaggaaaagaaaggctgtttctgggtggagaagtgctttaattgccctccctagtttccctctgtgtcaatgaagctccctctgaggcttcctcattctccccagggccagcctctctcagctggaggtgtgacctcctgggtttagactggggatggagcttttggaagatgtggggctgagctgcgaactcagagattctttgatggtagcaacagtggactgtggctatgagaatgggaggaatggaccttcctttcttccatacttctttgcagggttagaatcaggatttttttcctagtggaagtaggttgagttagctcacaaatctgggatatgggagaaagggaaagctcttggaagctcgttggaagaaagtgcatgtgcccaccattagtttagcagatggaaatgtatttgggcatgccctttcccacataaggtcaggggccagatgggatgagaatgtagagggtgtctgtgtgacctggagttgagaagcttttggctccgaggccaggaccacttgtgcctgctcccaccatggctgctctggaagcctctttctgggctggtaccatatcccatgactctcaccctggttccaaggaagggtggtcatggatatctgttctggaaccaccttcagtcttggccatctgccatttgcttggctttgcactttggaactggaacatatgtaagttatagttaagatctgatgatggaaacttctagaaataaggtccagcctgcagtgatattgtggataagatctattttactttggttgttctttactttcctattggtgacctcccatctgcaccccgaccgccaggagctgggccctcctgacttcgctggcaatttctatcatatcgtcagtcgtccagcaaatgtcacctggagggacttcatctcacaccgtgaaacccccacacatccgattttgacccttaaagcgcatttatgattttctgctgggcatttcttgagatctgaacatttggtttctcttcctttcggtaggacaacattgccgagaaagcttgctgtggggttccctgcaagtgctctgggcagaggggagaccgcgggcccatcggcagcatcgggccaaaggtacggtggctttacccttgcccacgcctgagatgaggtgtcagaagcccgacattactttggtggggtaatttctctaacagaagagtgtggagatgaaggaggagacgagagaccatttcttatgttagaaggaggagctctgaggggcagacctgcgtgctgttctgctggggcctgttccagtgaagatggttcaggcgggaccctccttttgcacaggataaggggatctgtgctttaacagcttggtccttcatttcataaaataatgttaaaggcagctggcgtccctgacagcagcctggctgcgaatggcagctggaactcatagcatttgctctgagtcagtaggaactaacaggctttcttggcagagcaggagccttagagatcctgatagagagaatcgtgacatggtgtactgaggggaaaagcagtaacagggaaagccatgctgagttttagtgctgctctgccaaatgaagggggaccacagggattcttactgtagagcaaagaagaccacgggattaaacagaggacccgattactttgtttcagggtattcctggagaagacggctaccgaggctatcctggtgatgagggtggacccgtaagtaaaaattgttttagtccctaaaatttcaccccctccttgatccttacccattgggattgcattgtggatttcatcatttgttcagttgctgatggctttccctttgggagaaaaattaatttatacttttcttaacaactttgcctggatgtctaagtacgataattgaagtatgacaaatgtgggcatgaagggtgggatttgttcttactctgtttcagaaggagggattaattggtttctgagccagagggacaccgaatttgcacacccagtatctactagattaagacatgcaagtagagatgggagtgagctgaggggcagggacacagcaggagacctcaccagggctttaggggttaccccgttaagggtagtccctggaggggatgttgctggatcagatcatcagtatccgagggtcttggggatggacagaccccagtagcagggtccatgggagcaatgcccaagacagacacctgtctggggagctttgggaccctagatcaaggtccagccctgggataggggacagaggggctcacgaggaacagtgtggtcaccagggcccagccggcagggctcggctagagaactgggaatcaagcatcacttggaggagctgtcagcccggtgggtcttcccgggattcagcacccacagagacacagtgctgggggccacccacccttgccccacagggcagtgctgtctgcgctgctaccctcccagatctcattcccttcagggaaactgcaggttccaggccaggcctcatgcaggggcccaagaggctccctggctcacgtagcctcgatcggcgttccccatggtgaaatctgctttctgctgcatgctgttcacagtaccctttacgctgctgcaagcccggcagagaaagggtgatgaagggctccagcttgcaaaatgcctttgtctctcacaacagggtgagcgtggtccgcctggtgtgaacggcactcaaggtttccagggctgcccgggccagagaggagtaaaggtgaggcgtgggtgatggggttgctagcgtggggaggggtcaggtgactcgcagtttctccagatgctgccagggagggaggcgctggtccaggcttcttgacctcagcattcagcagcccgtgacctctcattggaaggcagttctgagcagggtgggttcaggagcaggggctgcagctggtggggagcctgagaatggagaaatagtttcctgtggaaacatgaagaagccaggaaaccctcacaaggagagaacatgggccagggcggagggtaggctggtgcccacggccccggccctggaccgtgggagcagtcagggaagggagtggagtgagaggacagcaggtgggttgaaggctggtgaacttgcttctctgtttgctgaagtttgaaggcaggtgctgaagggaagggctgcaaagttacaaagtcagctccttgccctgggttttggggtccacccccgccggcccagggagccaagaccacccaagcattcagttctagttttagttttaaaacatcgcacgtggtggtgagagaggaatccaaaggggtaggactctaatattacattttcagacactgcaacattcaaatggggtggagtgggggaacagcccttggcctcttctgcccgagggaccagccctgcaggaaaagctaatgcttcccctatcgccttgccttctagggctctcggggattcccaggagagaaggtatgcaagcttggttttgttttacaaatggaaaactctcccagtatttctcatttcttcctttgccagaatagctttctatacttacctgtccgccttattccctcttagggcgaagtaggagaaattggactggatggtctggatggtgaagatgtaagtgattttactctaagtccaaactgcttttggttctgaagattccagaaactaacaactcagtctgtgatagaaattgcagcaggtgtgacctttaatccttgtctttggcagggagacaaaggattgcctggttcttctggagagaaagggaatcctggaagaagggtaggtgtatttccacggtggtgctattatggaaagaatatcaacatttcatttagggaatagttattttctttcctcatatacatcaagcccgcttcctccaggcagccttccctgacctcccctgtgagtgcacccattacatcccctctcagctctgacacattacagtacattttcttgtttcgagatcacatcccatagggcagggactgagtttgttttgttataaataaatctccagtgcctggcacaaagtgggtccccaataaatattcatggatttactaaacgaatgaaaaatatgtggaagtgaatttgccttcatggtgaatgagtaaattgtaaacattgttctagttaagatttatgagttgaagaatgtgatttttagggtgagataaaaatggaaacatctagtttttagcatccacttgtgctttttctttagggtgataaaggacctcgaggagagaaaggagaaagaggagatgttgggattcgaggggacccggtaaagatttctttattgacgatttcagacctgagcctggggaagagggttgttgggaaagggggatgaaaggaagaattctacttttgaaattgctttaaaacacgttgataaaatatgtgctttgtctttttcttgcagtttgggggtttggggagatgtgttggttctcttgctaaccagataatcatttgcaagtcctgttatacaaatatctgagaagtttccaaaaatgtggtatcagggcacttcaaatttgcttttggaaaagagaagagtttgcagcttttctcattttgtgtctctgtaaaacgtttaagcaaatgagcagtacaagctagcctcttcttccagtccatcctgcctctgtggccaaggataagcaggagtgagcctggggcatcctcctccctggggaagaacgattgcacctgtttggggctaagagtgctttgctgatcccgtgattgggtttcgtaagacctgcatggatgttacctggatgggttgtggccgaagggcttgtccctcgaagccttgcatgcaggtccttgctaatatttccctgaccatccagtccagtggcagctgctttccttccatatgtggctcatttccctttcccatgttgctttcagggtaacccaggacaagacagccaggagagaggacccaaaggagaaaccggtgacctcggccccatggtaaggtgctgcacattcctagactctccctgtactgagggcaagagaaaggacacacttctcggctcatcagcagccacagaggccaaagacgtggcctttaacactgcaacgtagcctaagattagcagcagagtccccgtgaaggaagtctccgtggggaaccagagtgacccttgccaagtggggcttctcagcagaatctgtgcctcttagatatttacggaaggtgcttgttaagccaaaggcttgtagaggtgggagtgtactgaagtccggtgcatcctgcaaagtgtgcaactgtcctgcagacgggctcttcctctgtgaatcgacccctttccctgcaatgtcttgtgcagcatttcagagctagacattcttctctgcagatgagaatctcatgctaattttccccacaccagggtgtcccagggagagatggagtacctggaggacctggagaaactgggaagaatgtgagtgccattagggctttggggggctctgtgacaattcttagtgccataagatctgcccaacatgacctggtgcatggttagtccacagctctgcagtgagtgaatgtaaaaggatttctgaaacggttgttactccaatctattttcattcttataatttccctggtgcttcatctcttctctctccccaattcttgctctccccaaaaacatactgaacagatacttttaaaaataatatctttgctactttcaaatatcgggccaggtttgatccaactaaatatttaagagacccaaatggaaatcctaatactgggggagggagggaataaggggcaagagggctgagggagttgtggatttgttgtttttgtaattatctgtgggtttttggggggatgctgtaagtgaaataaaaaaactagatttcttctttttctggcgtattgcatcttgcaatttcaagacatttcagaaatgtctgtagcagaatagctccttgtatgcctaatcctcagtcttgttgaataaatgctaaagtcaaagtgatgtgaatgatctttctgaagccaaccaaaagcttccaaggtcctcgggcacagacagcatctgccttgtagctgggagaagaccagtggtgtagaagtttgtaacctctcagaggaaattcaggatgctggtgggtgcctaggggaggtctctgctcagaaatgaacagagcacaaaggctgcaagctggggctgggtgctgggaactgggccctcagccacgccctgaggggcagtggctcgttcggcccggcacttgggccagtagagttcgctggggtgaggggctttcaaaaggagcgactcaccaaaatcaaattgatggactatgggcatcattttgctttgaaaattcagaagaaaatagaaattttgaaaatatcattttaaaatgtttgagcactatttatttatttatttttaataaattgtaaagacctggatcaactgcttggaagtgagcattatttttgaataatgctatataatgaaaaagaagctatataatgaaaaagaagaaatactcatcaaatgttacaatgggctattacaactcagcgtgtgagcagagccaaaacttggtttcatgaaatgacttaaaattgagtagttcatacaattaatttcaattctacacacaaggtagaaactggatttgaattcggtttcagtcacgggctcttgaggactcagttcttccttttgtggtctaatggcctgctatcccttcccttaggaccacagtgccaggctcaggccaagctgaaatgtgtccctcccactgggcttcagcatgcctacatcccctttctagagtctccgcaggcggcctctggcctgagcaatgtatcactgagtgctgctggactctcatggaactctagcatgtctcttttgggaggggccaggccagattgttggtttgtagaggagaacagtgtccccttgtctcaaattttccatggaaggtggccaagatcttccgctgaagcaggtggcattacagcgaataatggcaaactggtcaccgcagatcactgggctggtccattggaagtggagagtgaggttcctaggttgatgtagcagatgactgagccccacaacagagctagtcggtcacagcctctgcaacaccaaccctaactttgcaaagaccgcctgggacattcataaagtcccaccccaaacctttctactgctgaggaaacaattttgaggtggaaattaatggattacttgtgaagtaagcccacatgtttgaactaaaggtcacctctggagcatccaggaagatgttgccaagtcgtgagccctacctaagtacacgagacgtttaggtgcacatgtgtgtgcttcagatattttacttaaccgagtgtgtgttgtgtttggccgggatcacttggagaacctgggactcccttccattataattaatgtatttcatgacttctcagtacagttgggaaggtggaagaaaaatagacaggttgacattcccttttcacattcctcatttgaaactggctgggatcgtgcagccaaaaggagtcattattttgcttggcaggtctgcagtaattctcaaaacttccattgggtgattaacaggagcagcaaggaagcaaaacttcacccggatgagggtggaggaagggtgtctgtgtgtgcgagtttccccagggctgatgaggtgtggtttctggttcttggcacgatgtgggtgcttgggaagattcccctgagtaaccgcagaataagagggtgaagtctgaaagagctctaggccccatgcccagcgtcccatgctccccctcacagtttgtgggactttttcttccacagggtggctttggccgaaggggaccccccggagctaaggtgagcctcatgcagtgccccctggagactctcttcaaacagcccagatgccgcccagcccaggagtgaaaaacactctctcctgtgaacccaaagcttcggagacagataccaatcaatttagaaagttgatttcgccaaggttaaagacatgcccgtgacacagcctcagaaggccctgatgacacctgcccaaggtgttcggggcacagcttggttttacacattttagggagacatgagacatcaatcaatatgtgtgagatgtacattggttcggtccagaaaggtgggacaactcgaggcaggggaggaggcttccaggtcataggtagataagagacaaaaggttgcattcttttgagtctctgattagcctttcactgaatacacagtttaccagaacagtcacctatgccttagttaggcttagtgaaaaacagggcgaaggaagcaattggatatgcctttgtctcccatgagcagagggatgactttcagttctgtctgtcctttgtccacaaggaatttccctgtgggcagaatgtgagggaggtattcagcttaaaaaaaaaaaaatctggccaggacggtggctgatgcctgtaatcccagcactctgggaggctgagacaggcggatcacctgaggttgggagttcgagactagcctgaccaatatggagaaaccccgtctctactaaaaatacaaaatagccaggcgtggtggtgcatgcttgtaagcttgtaattccagctactcaggagcctgaggcaagagaatcacttgaacccgggaggcagaggttgcagtgagccaagatcatgccattgcactccagcctgggcaactagagtgaaactccatctcaaaaaaaaaaaaaaaaattctttgtagctatcttatttaagaatagaatgggaggcagctctgtctgatgcagttcccagcttgacttttccctttggcttagcgattttggggttctgagatttatttttctttcatcctccttgggctgttctggctcccgaggctctgtcagccgtctccttaaacagcctcttctgcagagtctagagaaaatggtgcccagtggggacttggggtccaagtgcaggaaacatgactgaggcagtagtgtcccgggcgggcgcctcttccagaacgtgctcacctatctggccatcagcaacccgcaacttcccggtgtctcggtcctctgctttaggtctaaatgatccctgtttcacaaagctgtccgaggagaggtgaggcaagagtgaggaacaattgtagaagtgcagggagacagctggctcctgtgctcagtgtctcacctggggttaccgctttgatcatctgttacctctggaagagctgagttttccctggttgctttccaagtccctggcccagaaatgactgtagagcaaagagctgacattgacaggaaccatcctgactcctccctgcatcttctcttatttcaaagggcaacaagggcggtcctggccagccgggctttgagggagagcaggggaccagaggtgcacaggtgagtgcttccgtgtgtgactgtgtgccctctgatatttcacaaatcatttaaaaaatgattgggtggcatttatatccggaaagttaaccattttaaagtgaacaatccagtggcatttggtacttccacaatgctgtgcaatcatcacctctatctaggttcaaaacacagtctcgaaggagacctgtacccattagcagtcactccccatcaccctccaccccgagtccctggaaaccactaatctctctctctttatggatttgcccactatggatattttgtataaatggaatcatttactaggcagctttgtgtgtgtggcttgacggagcatcatgttcttgagcttcatccacattgcagcatgtagaagcacttcattcctttacatgatggaaggatactctgttgtgtggctacagcacactttgtttatccactcattggttgatggagatttaggttgttgccatcttctggcaattgtgaatgatgcttctgtgaagattctcctacacgtttttgtctgaatgcttgttgcttgtatacattttaagctcacttgcctattcacgatctggattgaggcagctgctactgcagctaagacaggataattgtgggttttggtggccgtttttggccagcagaagtgaggttccaggccctgtgggatgggcagatgccatgcagaggcttctcatggaaagtcacctcattagcactcacgatggtcttttccttcctcagggcccagctggtcctgctggtcctccagggctgataggagaacaaggcatttctggacctcgggtaagcctgtcctaataccagccccctctctagctgaacagagggcacattgccaagcaggctgagagagtttctcggatgatgctattgtagacagacctccctttagctctcctctttggcaacaaaaaccccagatttaacctcaggccttgcagtgactggctacttcaccccaagaaagtaagagtttccttttttggtgctccatgggcctctaagtctcaattctgctccttccaagtgtccctgggtggaaatcaggggatatgcctcaggatggaatcctggaaaatctaaatctaccaaaatgcttagattctgcaaggtgtttcccctttggtccctggagatagccccttgtgcttatgtattttgtatagtgagtgcctcaagttcacccatgagttcagcacagaagatggcccttaaacttgctgtgactgcagatgttatcttgcaaagcagctatcagcaatgatgagcagagacacactgtcattgctgggctaggatcaggtgtcacggaattacgtattcgggtttccctcatggctgagatgatattgagggaggcatcctatcatttattaccaaaaaatgactaataaactggtaacgagctcaatatgttgctacataaatgtacaaaaatattttatggtggaagcaggcaagaacttgcttagaaagtccttctctagcttgaaagctgataaatacatatctttagacgtttttaaaaaacatttacttaacttgtaattaatcaacaatttaagatggtatagatgcaaagctattcaaatagttatccagtagctccagaaacatttattaatttgcactttttcaccatctcttttatgttatttgtgggttgcgtagactgtaccacattttaagagttaatttcatccatcagtttattcattcacctaacaggctttaacatgcccatatgtaccaggtgctcactgtgagggtgtgaaaagggaggcagaataaagtcacataaaatctgggagcttgccgtcctgtcaggaacctaggatatgtacattaataactgcaacatgcattaatttgtgaaaactggcactgagaggtaatactcatgttttaaatttgtgcatgccatttctgtgcatgtttatatttgagtccgtagccccgtgctcagagctgagtgcttgggatttgcaggtgggacaggttccatgcccctggcgggctctgacttccatgcaggggagagtcaggtttcagagaccaatttgcctggacggttggccacttcactgacacattcctcccctcctgctccagggaagcggaggtgccgctggtgctcctggagaacgaggcagaaccggtccactgggaagaaaggtttgtctttagaaaggtagagctttcctgaggacagggaccagccaggcacacatgcccctctccctctttggtcagtctgtctgtccctcctcttcagtactactggttcccactccagcctcccctgttgatcgcggcttggccagtggaatcattgtcccccaacaatccccaccataattcccaccaccatccctgccaccaaccatctctgctcagagggctggctttctcctggccacagccctccatcagctgccaggttttctgctcctctcttgcttggcttgtgccaatagtgcagcaccctctgagccatcagagcagccgggcagtgcttggtacagtttcagtataatatggaacgagcagtctttaaacatgggcagtgcacgcacagtggctcagctaatcacatttagatcatccaagagccccgaccctgactgtcctggataacagcaagtctgctgtatgaaggctgcctgagaacctcctttctatcagctttgagataaattacaatttgtcataaccagtccgaaaagactgcatgttctctgtaaaagaaatgagttcctgtgaatccacgatggtctctgcctggagagtgttttggggttttatgctgggctcaatgcccaccgccttccgtgccttcttctcccagttgttactctctcttctcatcagcccgtcccccatgccacgctggtgaaaaggacaaacaaaaccctcctggattcttttccaggagtttgcacatgaatgttgcaatttagaaaatcattccaccgaaatctcaaaggtgaagtcagcatgttgcagcacccttacctagagcaaaagcatggcttggcatcacactgtaagccagccccaggccacagggtctcagccatgtttctcatgtctagggtgagcccggagagccaggaccaaaaggaggaatcgggaaccggggccctcgtggggagacggtaaggtcacagcgcgcttggggtcaggctgtcgctgactctttgctggaaggtgcaggaagccaggagagggttccaaataaagatgagccttgcttcttgtattattggggatacggctggaaatactgaaacttgctcatctgcggcaaattaatttaacaagttttattttattggcaggggtagagaggtggggcgggccgtggggagagacattttttcccctgtgtttttcctgatacaagagaatgtagaggctaatgaagcttaaactaccttcatcttaggtcccgcaaatgctttgcaagcataactagatgaagcttttctgcaaagaagtaaatgtcatttgggttaaaatggaattggatttgattaggtctcagtccagatggaaacaatttcttttgaatgagacatcttaggaatagaaattattacctcagtaactcgttttttaaatgctatttaaaaatgccccaaaaactcaccaacaataattttgtgatgtacatttctacgttacaaaagaataaagaaatctacggtccattgtgactttttccaaaaggagtcatggcacctaacactgtataaaaggaccaggttgatctgactgttttaattccaagcatcaaaatatttttctgtctttcatttttgtcttttcaactaactgaagtttaaaaacgaatctgtttgtattacttttaatctcagaagcacagggaaaaaatcagacttcaaaccattgaaggaaatctcttcctgattctgtttctagtaatttgggtcaacagatctctagttgttgatatctgttgaaaactgtaaattaactaagtggcaattcctacatatgttagagatagtaatgtacaattcacacacgttcttctgattcttctgattcataattaatgacgtccagttctgaatgctcctcatgagagagcaacaggaacagatctgagcatgctggggggaggtgttggaaaggagggggtctaggggtgatgacttggaaggaagggaagggatatggggagggggaatatgacctgggcctgagagatggagttcagtgttttggttttgaagtagaatcaaagacttacggatgcatagaatcaaagtaaccatcaagattcctgtcaattctaagattcttggggttgacgagtctttgattctacatccaaacagaatctttaccaaaagcaaccagcagttctttctatgttagtccgccagtgccattttgctacgggagtcctttgagcccaccgcctacagaaatggtcttgttcacacttggaagataggacaggagcaggaagtgtgcctactcctgtaccttagtctgcaaacatttcaggagctcaaggatccacttctcaggggcagcggcagggcagagacggtggttatggtgtgccaggcatggcgacctacagtcacatctctttcccactcttagggagatgacgggagagacggagttggcagtgaaggacgcagaggcaaaaaagtacgtatctgctgaggattatccaagcgtccttgctgccaggaggctccaaggacaacttctgatgtgttgtgttttaaaagaattatttctttaaaaattgtctttgtatttgagtgagtgttttcgtttgatgactcagcagacatttctttctttcaaggtcaatttattttagatgaatttaaattagaaccaagtattaaataatctatttttcctttatagggagaaagaggattccctggatacccaggaccaaaggtaaataatccctggtcggtgaagcatcatcatgattttgggatggctctggtatgtccatggactgagaatcagaatatcttggcattagtcttgggtcagccactcagttaactgggctaccctgagaaagacccttccttccctaaaatactctctcatctgtcaagtggaggtcataatacgtacttgtcctggtgtttatgagatttaaataaaatatgctgcaatcaaagtactctgtaagctgtgaaatgctataacctacatgatagtatcattactgattaattaaattaagaccatctgcaaataccacaaatatagtagtaacccactggaaaagtgaatcaaaactaaccacttggctgcccgggaaaagtgtgacccacacgtctcctggatgtcttaccccacggaccctcagtgagatcttctgttccaaagcttactgtgccacttctcggctttcttcccagggtaacccaggtgaacctgggctaaatggaacaacaggacccaaaggcatcagaggccgaagggtaagtttgcgtgggccttggctgcaggtgaggaatgagaacgtatgtctcaatgtgattaactgctgaggctttgacaattatccttcacttgcaccctggccagggatagcacagggtggaaggaagggaatcctgagccccagaccaatgtcctcagggtgccaccatggctgtggtccatggctctcctcctgtaggtgtattcctcttcctccaactcacctccagggtcgccagcccagctcactccaggcacagcacccacctgcagtctcgaatctcattatgggtgactgggaagtctgtgcagtcactttgggccatgcccacccagacggccaggcaatgggagtgaatgaggcatggcaactgcttctgaagcctctaggcttgcaagcgagccaggccaaggccatgggctcctcagactactggtgctgagattcctcttccttaagctacttttagccctgatagctcttttctttttattctttgtgtgtgtgtgtgtgtgacaaggtctcactctgttgccaaggtctcagtctgtcatctgggcggagtgcagtggtgccatcttggctcactgcaacctccatctcctgggatcaagcgatcctcccacctcagcctcccaaagtgctgggattacatgcatgagacaccacacctggccagattattcttcaatggatgtttactcaccctcttaaaatggcagagtcttcaattagcaaattgtggcctagatctgtgtaaaggttgctaacagttattttcagcctgaaatgtagtttaaaaagaaacataattatcttattaatttgatcagtgaagacagtcaaactagatcatttaatatcccaaagagctttaaaacattggatgattatctacactgaacgcattagctaattcactgtctgttacctattctcctgggagtccttagtaatcatattagtggttcttgggaaagcacctgtcttaccttagcctggcagagaacacaatatacaacacctctatagttggtgggggactcccattggctttgttgaggttgcttgtccctaaacttgaatttaagagacattttagctcccttaaagtgagagatttttcgtggtgatggagtcccttgggttagatcacttttaccgtaccttccaactataggagccttaaattctccactttctgacacagttgaacaatgtttgttctgctccctctagggaaattcgggacctccagggatagttggacagaagggagaccctggctacccaggaccagctgtaagtatttatccagttctgacccggccacctggggctgggtgctttacacgtggtccctgaaaacttcccaccatctgctttgctcacaagaaaatgtgctctctttgtatttgcttggttgtcaaaccgcctctctgacatcatgatgcagcaaagagattttgaattttagagtaacaagaaactttaaaaaaataggtttcatgggatatcctgtcatctagggagtattgtaatttgcctttatagtttcctggcataggtgcatttgaggtttgtgtagaggagaaaccaaagaggggaaatctaaataccttttgcttgcatcttgtagaagcagtgtaattatgccaggccttggtttgacaatgcttcctgtggtctatgaaatccccaagggagctcctgatttgtggttaaatcccactagtcatgctgccaccaggagccaggagggcatcctcccacagcccttccaaacctctttattgctaatacctttgttttcttatttgaatttctccatatattgtccctcaatattgaaattggtgagtttcaaaaaataatggaaaagataattcaggagttggaaaatcattcctagaaggaaaggttcagggcttagtttggttgaattagggaaaagaaagctggtcaggtgggtctgattgctgtctttaagtaggtgaagtgttggggggagcacattaagccagttcctgcagaagaccaagcaggcagaaatagcctcctggaaagacaactaatggcccatgagatgcctgctgggctgtcagggtggtgaggtttaggcatgggacactgagggaagccacgagtcagtccctagagctcctcggggtggaattcagctgggatgctttagacacggagggagccagggcagctcaatgatctctcactgccccttcggcaggggacagcgtatcaagcgtgtgaaagggagctcttttctcaagagaagcagaatctagacccaggttcactcgtgggctttacatggattggtggtgagcttcctggtttcagaacatgagactatttcaaaggccaaatgacctcccagggaaacacatttgctccagaatcttctcttttttgctttgcaagggataagatcaggtttagagggagaggctgtaaacaatcaaggttatccaggggcccctttgtcttgctctgtgtatttctgggggccaaagcctgtttattcgaattccccatctgctgtgcctctcacctttcgttccttggttttacagggtcccaagggcaacaggggcgactccatcgatgtaagttgcatgtgtccagaatgactcattaacctcatgagcctttgatttgctctctttacatattcttttattttcttttaaagcaatgtgccctcatccaaagcatcaaagataaatgccgtaagtacatgattttctgttgtctcacaatgcatatttttacattcgaaattctcacatggtagagtagtctctcaccctttcttctctttgcttcttttctagcttgctgttacggtaagttgattttggtgactttctcctaaggaaaggaagcctcccttttgtagtaagtacagtttgtctttaaccctccaccctctactttccacagggcccctggagtgccccgtcttcccaacagaactagcctttgctttagacacctctgagggagtcaaccaagacactttcggccggatgcgagatgtggtcttgagtattgtgaatgacctgaccattgctgagagcaactgcccacggggggcccgggtggctgtggtcacctacaacaacgaggtgaccacggagatccggtttgctgactccaagaggaagtcggtcctcctggacaagattaagaaccttcaggtggctctgacatccaaacagcagagtctggagactgccatgtcgtttgtggccaggaacacatttaagcgtgtgaggaacggattcctaatgaggaaagtggctgttttcttcagcaacacacccacaagagcatccccacagctcagagaggctgtgctcaagctctcagatgcggggatcacccccttgttccttacaaggcaggaagaccggcagctcatcaacgctttgcaggtctgtgctctgtgcgtgctgttggcatctccctttcttctggggctctgagaaggttctcagacacgtccatgctcctttgtggcttcatgtcccatagctcctaaaacgtccccaatgaggccatctgcctgagaacttctcttgtgaggtctccaggacaacctcgtggctccagcactacagggacgcctacatgcttgtagcactgcccccaggtccctcctcacatgttgacagctcttgccggttagtgatgctagtgttggtgacactctctatctactaacaaggtggtgtgacttgtttgctttattcatgaggacctggacgtttgcatccttcctgtctcctcccaagatggccccctgtgcacactctgagctgtgtcttactgtgtactgggcatttgcttcccataactggctggtgaggtttgtatcatcagtctcacctcatggataggaagatcctgctgttagtgaggtgctcgtgagaggctaggaccctagtccattagactctgaaacccatgtgctgatgatacccattccagtctccactctgtcccaatcggccctgaaggtgaatatccagggtggccctggaggcctgtagtctctcagtgaggtccccaaaactatgccgactcagcacccccaatctacaccacaccactgtgcaaagctttcttcagtgaggccccaagggtcagcccacggagaggccaagtgtcgcttgtaattctattaaataactggtttaattgtgtgttttttttttttttttttttttttttttttttttttttttttttttttttttttttttttttgagacagagtcttgctctgtcacccaggctggagtgcaatggcgtgatctcggctcactgcaacctccaccttccagttttaagtgattctcctgcttcagcctcctgagtagctgggattacaggcactcgccaccatgcctggctaatttttgtatttttctttcttttttttttttttagtagagacgggggtttcaccatattggtcagactggtctcgaactcctgaccacgtgatctgcctgcctcggcctcccaaagtgctggggttacaggcgtaagccaccgcacccagacaactagtttaattcttacatcaattaatatttattcagtgcagttctggcgatactgttcaagacagatgggtgatgggtaggaaggagtccacccgggagtcaggaggccttggcctggttccacactccccccacccatttaaagtaatgtgcacgccacttagcgtccctgcgtctcagatttttcacctgtaaattgagactggggcaggatgattgctaatgtctttccttccacattggatattctatgcttttaccacagcctgtgtcggcgaaagacattgggtcatcactgccattcctcagggcttgttctgccgaacacaggatgatttgtgcatagagcgctgggcttgggaattcagtgttgaagttgggctaccggccatgtgctcttgatggggggattcattcacataagtctgtccttgtgtgggctgagggacccagaaccacgtgagtttcttagcatggtttcaacgagatcaaaaaattgttcattcattaattatttgctcattcattcattcaaactagctatttgttaaatgaataattactaatcgtgtgccaggtacggcgatagacaggactctttgcacccactgggagtgattttgttacttgctttaaccacacctgagagggtggggaagggatggagctcccatattgttgctaaaaataacgataagattaagttcctactatttgccagaggatacaccagttactaacatttattatctaatttaaccctccaaatgacaccattaggaaggtattaccccccattttacagctgaaaaaaactgaaacccatttgaacgggatatgaactccagctcaccctagtagaataaaacctatgtctttctattatactcagagcctaaccccacccccaaatgagaagatattcccaatactgccctattgggaagttaatctattttattgatgtagctttgatttactcctctgccatattttcagatattactgatcatgtacgcccctaccaaaattgttcttttgtttaaaccagatcaataacacagcagtggggcatgcgcttgtcctgcctgcagggagagacctcacagacttcctggagaatgtcctcacgtgtcatgtttgcttgggtaagctgtttctctaacaggaagatctgctcagctgcaattgcaaaacataatatccatgggagagtgagagaataatgatgatctgtaaaaagagcttgagttcaattgattcacaaagcctcgtatttaccagagtaaatactactgcagcagtttctatattaaaaatggacctcccaaaacagagcttctctttgatggcggataattcattttataggtaacaaaggaggaggcagtttctgcttaagttttgacattagaatctagaatgaaaacattggcactagtgactttctagaacatatttcttcaaagagtggcagagaagtaatataatttttcatttcttttaaaaatgccagcacatggtatgctacaaagattttaggttagtgatttgtttcatctactaagtattaggtgatagaaactgaaatctggccataatcaaatcaaggcaagatataaattggttttggttgtgatgttttttttttttttttttttttttttttagacagagtcttgctcttgttgcccaggctggagtgcagtggcacaatcttggctcactgcaacctctgcttcctgggttcaagcgattctcctgcctcagcctccagagtagcctagattacaggcatgcgccatcaggcccagctaatttttgtatttttagtagagacagggtttcaccatgttggccaggatgatctcgatctcttgacctcgtgatccacctgcctcggcctcccaaagtgctgggattacaggcgtgagccaccgcttccggcccgcttttgatcttatgtgatcattttaatcgcccaagtctcccagcagattgatgagctgtgtatcctgctgtgggtgtcacagaacaaataggctgccatgcttctttctagacatctgcaacatcgacccatcctgtggatttggcagttggaggccttccttcagggacaggagagcggcagggagcgatgtggacatcgacatggctttcatcttagacagcgctgagaccaccaccctgttccagttcaatgagatgaagaagtacatagcgtacctggtcagacaactggacatgagcccagatcccaaggcctcccagcacttcgccagagtggcagttgtgcagcacgcgccctctgagtccgtggacaatgccagcatgccacctgtgaaggtggaattctccctgactgactatggctccaaggagaagctggtggacttcctcagcaggggaatgacacagttgcagggaaccagggccttaggcagtgccattgaatacaccatagagaatgtctttgaaagtgccccaaacccacgggacctgaaaattgtggtcctgatgctgacgggcgaggtgccggagcagcagctggaggaggcccagagagtcatcctgcaggccaaatgcaagggctacttcttcgtggtcctgggcattggcaggaaggtgaacatcaaggaggtatacaccttcgccagtgagccaaacgacgtcttcttcaaattagtggacaagtccaccgagctcaacgaggagcctttgatgcgcttcgggaggctgttgccatccttcgtcagcagtaagtcctgcgtggcacagcatgtgccctggcctggctttatgctcgggccaggagaagtgtaggaacagtcatggaaaagacaaccgatgtgttgacaggaactgtttcattcattgaacagacatatattgacacctgccatatgccacaaatgcttttaggagccagagtaagcagggaacatgcagacagtatccttgttctcattgattcctttattccaccacatttgaccaagcgccacctagtcataaggcactcttggtgtccttaacagtttacaaatgggtgggcaaatggatcaaatgcacatttattacgcatgacataataggctggcatgtcgcgagagaagtgatttctgttaggggcaccggggaaagcttctagaaagagttgctttgatcggggcttagccaccagccccgtgcttggataccactgggtctttgctcatggggctccccctccctggaatgctctccaccgcacttcagcagcaaacccatattcatcttcaaagttcaattccaatggcttctgctcgccgtggaagctgctgctcccaaggcctgctcatggttaatccggacaccctatttagggcatctattacctggcctgttgatcatttatttgtgggtctgtggtcccctagactgctctttgaggaggtgcagcctattatagtttccagagcctgtgtacagtgtgcagcccagggtcagtacaggcaaggcttggaacagatgagggggatttataaagtataaataaacatgtatatgctaaatgtttattatttaaggcaatgttgaggtctatgaaaacagtattcacatttgtgaaggtctggcccccaaaagattcaaagaaaaatgtgaagcaaaggtaatcccccaggttcacccacaggtcactgttcctgtcttccaaagattaaaaacaaaagctttgttcaacaaagcattgagaaaatctgaaaagcagttgcattataatctgatgtccaagagtctagaacttgttgaactctccacttgatttttcttctatccctgtcttctctctcatgttggataaatatatctttaacttaatcacccaaatattgccaaatagaacatattggcttaccatgttttatggatccaatgccatcatactttatgtttaaaatcactggacatagtttgtctgatatagttaattcaacaataattatgggctaaataaatgttatgtgattcatttaacttgttgacagattaattttaattttcatgttattagcatgcggttcaattgttttctttgttttttttctttaggtgaaaatgctttttacttgtccccagatatcaggaaacagtgtgattggttccaaggggaccaacccacaaagaaccttgtgaagtttggtcacaaacaagtgtaagtgattataattattgtcttaaaaattgtagcgctgcagggaatgcacaggtcctccaaccacctcctgactttatgggatgaggaccttgaaatccagaaaatgtgacttcccaaaggtaatgtgggtcatgcttctcaaataatctgttttatcagttagcttttgccatgtaacaagctacccaaaacttagtggcttaaaacaacaaccacctatttattttcttacttaatttatttagagacagagtcttgctgtgttgcccaggctggactgcagttgtgcaatcttggctcactgtaacctctgcctcctggattcaagcaattctcatgcttcagcctcccgagtagctgggactacaggtgcatgcagccatgcctggctaatttttgtatttttttttcagtagagatggggtttcgccatgttgtccagccttgtctagaactcctgaactcaaatgatctgcctgcctcagcctcccaaagtgctgggattataagcatgagccactgggcctggccaacaaccacttatttaatttgcaattctgtgggttagcaatttttgtttgggctcaactgggtggttcttctgttttctccttggatcccttatgtttgtggtcagctgcttgtcagctatagagctgctggtctagagtggtctcagatgggctggctcatctctgctccatgtggtctctcattctcagcaggctagcttgggtttgttcaccaggtgacctggcagggttccctgagagaagacaagtgtgcaaggcctcttgtgacctaggttagaactggcacactgttacttctgccacgttctattgaccaaagcatgtccaaaggctaacctagatttaagaatggaaaactaggcttgatggaaggacttgccacattacattgaaagggcatgggcagagagaaggtagataattgagaccatagttccaaacaatttaccgtatctggtgtgaaatgattacgtaaaagaaggattggatacatcaaaaaatagactccatgtcttcttaaaattattaatgctgtgataacatgtaatgatggtaataataggaagtcatgtgcatgttctatgaagactgacgggaggggtgggagtgggcaggactgtggcacccatgccgatgctgctgcctggcccatgtgccgtgtttcatgccctgctccatctcgggtgccaaccctaggagcaaagagggcagtgggggcatgtaacagagggctagctggggtgatgtggctgcaagaactgagcccctgcagcgtgtcagcaatgtgtgctccttaagagaatgtcacagtgtgtcatgctttggagggaagtgcagattctgcagattctgaacttcgtacacagatgagatgtgaacgcaaatgatccttgaaaaatgactatctggcttacgactagctgactctcaagatggggaaagagagcccatctcttcctactgcagacccttctgtctatcaccacttaagtccttcagctctttcttttgacctcagaaggagtggctttaaatctcagcatagcaagaatgaatatcattgctaaggccactaggacccttatcgtggcactggatgcttcatttagctttgtagcctccatttttctaggctctaatgattcgtattttttctctgaaaccttccctgaaattggctcaacctttttatctttaggaaaacagaatgaatgaagtaacctagtatttgaagtcttatgatattaacttgaaaatatattaatacttcctaggacaagtagcaagatatgactataaaataatatattttcttctaagatcaagaaagctatgaagtgtgggtccttgttgttatgtctgtttgattaggctgctattctctctagatattggtaatagatcaagaaattgtaaaaaaaaatacacatacacaaaaattaagagaaataaaaaatatatatactcccagtaataagccctgggagcaaaatagtacatgctaactttataattttccagctcaacatagcatttgattgagtggatattttcttataatgtaagtagctaactactgatttcatttaatttttggtgtatgttttggttggttaattgctataatgagaacattgttggatattattcattattgtctcttattttctctctgcctttattttagaaattgaaagatgtttttgtagaacaatataagcttcatttttaatggttctatttttcaatatgctgttccatatctttttttagggaggcacagatccttaaaagaaggaatttaatatatgcactgctatacataatctataaaaactattgcatgcattttgctaaaacaaatttaatgtagctcatggggttatgtctttatttattttagatagcaggtaaaagtagaggtaatatttaatttgtcttaacagaaatgttccgaataacgttacttcaagtcctacatccaacccagtgacgacaacgaagccggtgactacgacgaagccggtgaccaccacaacaaagcctgtaaccaccacaacaaagcctgtgactattataaatcagccatctgtgaagccagccgctgcaaagccggcccctgcgaaacctgtggctgccaagcctgtggccacaaagatggccactgttagacccccagtggcggtgaagccagcaacggcagcgaagcctgtagcagcaaagccagcagctgtaagaccccccgctgctgctgctgcaaaaccagtggcgaccaagcctgaggtccctaggccacaggcagccaaaccagctgccaccaagccagccaccactaagcccatgggtaagaaagcccttgctagggctgccatcttgtgacatcctcatttcctgctccagggtgtgttcctcaaagcctgcatgtaacacactcagaatacagtccttgatctgggcttgtacacctggatgatgtattttaagaggtgttggttagggattccagcctcccactccccatcctgtgccctcaatcctgtcttgcgatagggatgggaagctctcattctctctggaatgtcagtgggggcacagttcacctcacctgaaaattgagttgtcttaaactaaagggaaaagtttccgtgttgaaataaggttttagctcctatttagggagtgagagagacagaaagaaaaacgctgcagttggttcttaggcagcaaggcagatgtttctgggctggtgtatggagccggactcgcctaccttagaacatgccttgaaaaggtctgggggagccctttgcaactgcaaactttgtctctgcctcatacccacagaaaaggggccctaagctgtgtgctgtggcaatactgggtgttcagtccagcagcttgaaaagtcagagcctggaccatcagtcattccccaaggctcaaatctatgctcatgctgaccatgagaaaaatattgaaagcaatggcaaaaaccacaatgactctgcaccaacttaatatatttcagactgaattagatacaaaaggtagatggctttaatgagaccaagagtatgttattttatcattttcctaaagaagatactggaagacactaccgaatgtcacaagctgtaaaggaaggctcatgataaaatggaaattatcttcatttgatgaacagtatgagagagaaagcagaattcctttaaaagaatttcatgtcataccctaaaattttatgacttaatatattttaaattatggggctcattttgtagcaaacacaacttaggattagtatgctgcatttccaaagtatcttcttaacaggcgagatttttaatagaaaaaaaagttgatgaataatgagatttttcattactgtgaatttcacatttcatgtatgctgatagattataagagcaatgttttttaggggcttgaacaagaaattagttccccgcctcagctaaatttcaagtcaatttgtctgttaacacatccctttcagatttcctctctcgctcatgcactacagtcatggaggattttattttttatcttcacgctctgatctatctttcagttaagatgtcccgtgaagtccaggtgtttgagataacagagaacagcgccaaactccactgggagagggctgagccccccggtccttatttttatgacctcaccgtcacctcagcccatgatcagtccctggttctgaagcagaacctcacggtcacggaccgcgtcattggaggcctgctcgctgggcagacataccatgtggctgtggtctgctacctgaggtctcaggtcagagccacctaccacggaagtttcagtacaagtaagtacatgatcagtacaagtcggtacctgatttctatgtagagtatcaaataggacacaaaggagacacttacttattgaatctattctgaaataaccacaaattcaaaaaacaacaacagcaacaacaacaaaacaactcagcctgggtgctttggtggcagcctaagcttataaaacacagaatggaaatgggattccatgtgggatgcagtcctgccctctgggtcctgggctactttttggaggaagccagatccacgtcgcctgagcacagccctttccaacattgcacccgggaaagatggccacgtctcccggtgagggctcctggttgcccaccaccccgtccaggtttccatgttcaggaaaacaccagccagtcactggctccttagggagtaatggaggtgtccctgaagtctcaccgccccgggggtggaggatgtcgatagctgagtctccctgccctgatctcaccatagttgggctctgcccttggctggctgttgtccccaggggcccccccatttcactgaggcctgcacttgagtgctgtcacagcttttcttaattattcatggtcccctctctcatctttctaaattcttctgggttcccccctcccattcttcttgacccccactgctccaggaatgtgaagggaaggctcctcttttcttcaggccaatgctattcagatcaaggaaccagcttgaggaaagggaattcccaccagtgccatggattaggcccatagagatatgagtccaaagacccagtcaaccctagggctctattttcctggacagcagcagaagaggctgtctgggaagtgagaggatttgttcagaagttcagggatcccctcccgtcgcttattagctcatggatccaacttgtagcccacagcataagtcgtggatgtagaggtgtcttggatctgtgtctttcaatcaccactccccaacataagacattaatcacagcaggcaaccttatatcagtcactaaggattcccaagccctcctgtttctgatttacctacgagttgcatatatttttcttttatagagaaatctcagcccccacctccacagccagcaaggtcagcttctagttcaaccatcaatctaatggtgagcacagaaccattggctctcactgaaacaggtgagttgtgaaactattaggtccattaatggcactaagaaaatacccatcttgattccaatttaacttcctgggttctaagtcttagcccaggcatgacttctatgggggaaaaggtccacgtcagctctgtgcagcccaacatcatcttattctgcataatcccaggtgtaaatggagtcttactttacctgtgatcagactcagtgaaaatttgatgggaggtgcttttggggctatcactagaattcacgtatccattagacatttctcctgtgcctcatactgggactcgagttgatttgtggtctgtgatgctgtgaagattggcgtttcatttactcagtgatttaatctaataaaaaaactgcttagaagaacacaagacaaatttggctggaatccatgaaatgcatgggtttggatctgacccatggggtgttctggtccggacatcctaagcacacaccccagcttagtgtgtgagtctgtgatactgtctctcatgtgcttgaaccccagagtgtgtgcatagtctatgctaagttagtgactggttaggtgtaattcaggaactgacagctgttacttgcttttgttcttgggcagtgaaactctgagagacctggaatctctcattcagcagaatgtggacttggcttgttcatcggtgagaaactgattattaaaatagttgataggctttgcttaagagtgttcagcaaagaatgatggtactaacataaaaaatggaaatgccatgggaatttagatataatactgttttatacacctgaagcaaaagctttctgctaactaggggacaattcattattttttggtgtatcgtctactgtcaggaggaggaaagcatttctcttcacaatgctcatttctgtaattgattttaaaggtgtttgttgagtgagcctgttaggcgaccccaccatggtgcttgagctcaaagagaagccacaaagaacacagtagattttccccaaaggtgtgggtcaggacagattcaactctaacttcaaagttgctgaaatctgtgtatgtcatttctcactcattggttaacttctccctgaatacagtgtgggaaatagaaaaattttagccaatttagtgcttcattgagagaaaaagacttggagtaaactagagatcagagatcaataatgagtaaactagacagcaagatttggggatgtttttgattctcttatgtgtggtccaaaagggacaagattgtataaacagtgcctaattcatataaacaacaatgtctttcagcaagggtctggctgggctgttttgtttttcttttcatatatatatatatatatatatatatatatatatatatatatatatatgtagagagagagagagagatggggggagagagttgtgaggttcagaattaagaaggtgcttttgatccagacctttaacactgagatcgcctgtctacctgtgataaagagaaaagagcttttgaaattggggcttgtgtttctttcaaggctgcaagtagttgatacagatgaatctaaataaaacctttctccttcatactaattggggcataaccctcagacccaggatgtgaatgtcctctcaccatttcatgtgtgtgtgtctgtgtatgtatgtgtgtacacatgcatatgtgtgttttccttcccagggtgaagacataaattacctttttttttttttaaaaaaagaacaaggccctgcataattgatctctgatctcttaaacttaatgacttcatagtaacaaacaagcacttaacctgccttggcctgatgaatatatgttggtgtacacacagttatggcatttttgagagctctttttgaattactaggttggtgcgaaagcaattgcagttttgccactgacagtaatggcaacaactggaattactttcgcaccgacctaataaatgggacatttacttaaaaatgtctaaaattcaaaatggataaccagaattaggagaggaatccttatcctccccacccctaccaacctctctccctcccctcctcaccttctcctataattgtcattttaactatttcccctggggtggggggaaaattttttaatggtttttatatatttggatataggaaaaggagtgacaatgaaccactctttattaaataactaaaaaaagataataactgcatgcttactcagtagttgcatgtatattttgcatccaaattccaatgaccacgatatgcattatttctccaaatatacattttctagaccattcaggcaaaatgaagttttaaaaatatattttttatatttacatgtgtccattttcattcctcttactttctgcagcatccattaattagaaacatgtttacagagatgggtccctttcttagtattaaatagtagatgctactgtttgcttttttacttctgtgaataaaagatgctgtcttaagaatctgtatttttcatagtttatcatgttagattctgggaacctggtgacctgtgtttgaatctgtgaaggaatttgtaggtagaaacactctgaaatgaaaaggttcctagtcctgggcacctaaggcaggggaagaggagaggaccagtgttaccattggttttcgtttgcatatgttaatgtttgcccattttgacagtcacattgaatagatgcttgtttatcaggaatgtgagtcaggcatgtaatgcgagggcagtctggttggggcattttttgtcctccataagatctggccctgtttggtatgtggcagggagactctcgcctttgagatgaaggttgattctgttaacaggccttgattccattaatatacctagggcatcgttagcaaccactcaggattccagctttacaatattacatgatttgattttcagtggttaatatttgtatttttttaaataaaaccaaatgaacccccacaaaaacatctcactccactttttgctttgctcggcatctaaaagaattatgctccagccacttttctgtcacacatctgctgcctgtaaatggcagtgagcagcagtggatctttcattcgttaccgtggcctcctgaaagcatgggtgtgctgggcctttctgccacctgctttgtcgctgctgattttgacagtgctacgtagttgctaattttggtttcaggcttttgttaccacctccctcttctcccttctcatttttagctaaggaagctttggatagatattttctatgcatattactattaaagctaagactgtctagaatttctaaacaacaacaacaacaacaaaaatctaacttaaaatttactttttgcagtattgcaaaatgaatcctaaattattggcttaatcacctgtgttaaagaagtttcaatgcagaaactagacaaaacaactaacaaaatcaccatgtcctttattatttattcttgaaattagcaatctgtagaactgatcacattttgtccgagtagacatgactgggccaattgtatagccctgaaggaaccatcattttgtgtttactaacgttttacttattgattctaagatgcacaattttcttctcattgggacacttctgaaactgaaatgtgacttagaattgacaatatatcatggtttattggtagcattttgtgttacttagtggaacataaaataatggtgcatcataaaattaagagctcttatattggatacaatacagtatttggttggccatgttccatgtgaatatatatcatcaattagcataaaatggtatatttgggggaaatacctgactttatgttaataataatttaaagaacaaactaatcccacagctgaagtaagttaaatagctacagggatttaggaaatggtcctctccaggctgtctgttgttcatcgctgtgtgaggatgttttctggttagttgtcatgtgtgggttatgatgagcccaaaggagtgttttttatcttgaagtcttaaaaaatagaagtctgttggtcaagatctgaaagagtaaaatttaaccacagctacattttaaaataaagttaaaaattggccgggtgtgatggctcatgcctataatccctgcactttgggaggctgaggcaggaggatcacttgaggtcaggagttcgagaccagcctggccaacatggtgaaaccctgtctctactaaaaatgcaaaaattagccaagcatgatggctcatgcctgtaatccagctactgaggaggctgaggcaggagagtcacttgaacctgggaggcagaggttgcagtgagctgagatcatacctcttcattccagcctgggcaacagagtgagactcagtatctaaataagtaaataaattaagtaagttaaaaatttggtaagtttccttggtaccctttgaactgaccaatgctcaaaatgtagacggcggaaagtgttttcattcaggcaaatcatacctgcatccaaggtatggaagtactttatactgtaacaacaatgccgagtgagaaggtgattgaattttcttgttttggggaccattaaactgatgaggaacatgttgatgattgcagcataaacacctctcagtctgtcttccttcagtttgctcaaggaagtacttacatcgtgatttggaaatcaatatgtttgggaaatgtcaaagctgatgcctttaaaaatgcattgaaacactatgggaatatcaaactatgaaaaagacaagattttccaatcaatatgttttccactttgaagaatacatatattttttgctgattataaagttaacagatatgcattgtcaagcattcaggaggtacagagaaatatattacacgattctcattgtgacagcattgctggcttttgatgaaaaccaatagtgacccgatgcatagccttcctatttttttctatgaatattattgcttgtgggaaggtgcatgcatcgcacatgcacatccactcctgcacatcattattacaaaaatggactgtggggcttagggtgccttgcgccccagtgtttttgaatggttgtttttaggatgttctaggtaggcacctgtggcttctgggaacaggtgggattcccagaacagggttttaacctaacattgtgcttgcctccatttcctctcttctatttggttactttcctgaagcccagtgaccaatagtaaggaagtttcagcagacagtggtctgagtcaggcagcctttcccctctctgttttccaagcaaacttagttacattggtattctaggttaggaagccggggaaggttgtggataattttcagtccccattgtcttttaggctcccactaggttctcaataataaagaagagcaaattaaggaagactcagccatgcgctcctctcacataaagagaaggctctagcttcctacaggttatacctggggggcagactgatttcagagggaaaagatgaacaactattgcatccaaagacgtgtcgttctagggaaaagtccaggttaagttcaacgagggccagccatctcccttggtactccaggacatttaaatacttttttttttttttgctttaaaacagttgctttaacatatgcactcatagctgagtagagtccagccaaaacgacatgtctcagaagtcaagattatgtggagtttgcattagaagccttcttaagaacataaaatcctccgttttcatgcttcagaagtagagaagtacaggtttttgtctttgaatagtgccgggttctcacctcactaatatatttctcttggttttccaaatatcttcttgtccacagtaacagtgtccttattttccactagtaaatcttacagggtctcagtagtgactctcactgaaataagggcagaaaacaccagtgccgtggtgtggaactggagggctagggtggagggccaaggaagctggagaagccaatcagacggggagtggagtgtgctgctgtgaggccactcatgggctgggtgtccgtggctctgggcagacctctcgtgactggttcagcagagcccaggggactgggaattgaacagctaaacacagatggtcaggactgaagtgcacttgaaacaaataaaatagagcaaatagggtccattggccaacgctctgggaaggaaggaagaatagggagatcatttgacgccggcctcacgctaacagggaagccaccagtaaatgaggaataaattttgatggttaaattaccttgccttgtcagttctctccaggaccttccttgacagccaggcattttccttcagttattggcatatttgagagaaagaaggttgtttttgtaaattgtcttcattttattctgacttcctggagtcttcaaaggctctcgtggggaccactggctttctgggccctgagagcgtctgcaactaggaggtgttgtaactgtggagccaccagccaccagcctggaatttgggtgacagcagcaaccaggaaatgttttagaccaattctgagcctcagtcctgtgcacctttgagtctggtccatcgtgggtgatccaagctatgattatccactgaagacttaggttttccttgtcctttttggtatctatctgaagcacagatgctcaccacctccgcagctgtgagcagcctgcctcgctggggacaaaggagatggagaagcatctctttgtaggggagagctggataattccagcctgttagctactcacaggaacatgcagaattattggctccagggagttttggagaaagaaggtttacgttttcaaacttacagataacagttgacatcaatgcttctctttcccagaacaatctggagtttgccagaaaactctgtaaacaggagtcgtgctgtgtgtgaactgtaaactcttctctccaggcgtcgaggggacctttgctttactttgcagctgggctacatcagacgtgtgcattggaaacataaacttccttaactgggaaaagaatgcttctctgtcttcaaaatagttctgctatgtgacatttttgccatcatgaattttacatcagtgctagctctttgttttacgtgtttcatttggcaggtcacaaaggctcttggctaccacacatacgtgcatacacacacacacacacacacacacacactcataaaggattttcttttctgctttacctttaattttcagtctacttggcttgtaatgaaaggtagagccttatttttgaactatatcccaacagaatcgaatttccattttgccaagaattataaaaccctgaggttttaaaattcagtttcttttctggggatttaacatggaaggacttggagggcaaatggcccagtgattggaaaggggaaaaacaattcatttcatttaaaattattcaataaccattgccagcatttgggattctgagtgctgtttatgaagccctttcattgatataatttcatctatctctcacaaggctgtaagcaattcctatgtccatatggcagtgaggaaatggagatttgagcaggttaagggagttttcacctggaagctcttcttttttttccttctgccacagtagggtcatcagactgtcagccccagcactgggagccgagtaacacgcatgttctcattaatatccttttctcatgtttttattaaagatatatgcaagttgccgaaagacgaaggaacttgcagggatttcatattaaaatggtactatgatccaaacaccaaaagctgtgcaagattctggtatggaggttgtggtggaaacgaaaacaaatttggatcacagaaagaatgtgaaaaggtttgcgctcctggtaagtgattcttccttgtgtttatggcttctgcaaataagagattcaggtcaataagtcaccttgaaaaatattagaagtgcaatgattatgatacatgtgaaaaagaagataaagtgtatcctcagataaggaagacgttcaaatacaacccatgaaatgtctttttgaattcctattttgggtttctaaaaacatattgtcccttgtcattcttcagaaatgttactaagttgctgttatttgtaaaatattgcaccaaaaatgattcctgggaagataatataatgaacaactacagataacgccaaagataaacaacccccacaaatttatcttttaaatagttttgcttcctataaataacaatgttgtcactggggccatccagtatctccattatattgtgcagttcaactggtaataaaataaacactttgaacagagcctggggtcagtgccagaatggggagagttcagttcgtataaaggcctggtagatggtgcagggcaaaagaatgggatcagatttcccagacatccctgggccccggggccccaggccaagaacgtcacagagggcctttgatggtactgagtagaaaagtgggacaggtgatggaaaccagaggctgcgggactgtgtcatgataatgacagtgcccttttgggtcagtaatgtggcttttcctctcttctctcggctcctcacctcaccccacccaccccctctctcgacgctcagtgctcgccaaacccggagtcatcagtgtgatgggaacctaagcgtgggtggccaacatcatatacctcttgaagaagaaggagtcagccatcgccaacttgtctctgtagaagctccgggtgtagattcccttgcactgtatcatttcatgctttgatttacactcgaactcgggagggaacatcctgctgcatgacctatcagtatggtgctaatgtgtctgtggaccctcgctctctgtctccaggcagttctctcgaatactttgaatgttgtgtaacagttagccactgctggtgtttatgtgaacattcctatcaatccaaattccctctggagtttcatgttatgcctgttgcaggcaaatgtaaagtctagaaaataatgcaaatgtcacggctactctatatacttttgcttggttcattttttttcccttttagttaagcatgactttagatgggaagcctgtgtatcgtggagaaacaagagaccaactttttcattccctgcccccaatttcccagactagatttcaagctaattttctttttctgaagcctctaacaaatgatctagttcagaaggaagcaaaatcccttaatctatgtgcaccgttgggaccaatgccttaattaaagaatttaaaaaagttgtaatagagaatatttttggcattcctctaatgttgtgtgttttttttttgtgtgtgctggagggaggggatttaattttaattttaaaatgtttaggaaatttatacaaagaaactttttaataaagtatattgaaagtttcctgggtgtgacgttcttggcagtcttgtttccatagcagcgattgtcagaatcacccctaggctggggaaactgggtttggttctggccccatggagctgtgcaacagcctttcgtttccagtggaggaggcaaaagagctttatcagccagtgtgcaaagagaccggctggagacaagcatcccccgctttgtggattcagccccacatgctccagtgctccatggccgagcggaaggtgttcctgctgttgggtcccggcagtgtttctgattttcagagtcaggctggcttctatcttttcctctgactcttggttggccctcagagcctcagcctcctcctgtcttcctctccacagtgatcctttcccagggggttgatttgcttcctctcacaatggctgagagattcagtgttgccccacgacccccaaccccttttctggagtctcaaagcacaaggtctttcatttttttgtttttcttaaagactgtttttttctctcttcagaaataatacaagaaaccaacaaatacatattcaggtggcacttgagttccacttacaaaggaaacaacttattggataaaatacatatgtcctgacaagtgctgagggtagaattacaggaatcttgggtgtcagcagaaatgttttatgtaaaatcgggatgaatttgccagttggtctattgggaaaggagagaggagtgtggccctcttcagaagcgccacttagtccccacaaggtcgccatgacctcctccccagtcctcttctatctcggcagctaccatggggtgctcaggtcagtgtgctctgagctgtgacccttggtgaccaaccctgggatctgccaggcacccaacaccagcctcttgcaggaacttgcggagcagagagctgtgggcccagctcccatagcggtgggctgagtgctccacttcccaagggatccctgcccccgccacccccattgacttgatctgctatggacctaaaatgagcatcacaatctggttttactttttgggttcctccggaagcagcccttaggactaaggatatgggtgtgagtagtttatttgggaggtgaaggaagtcactgagtggctgagaagtggggagtgagacaagcaaagggagagcactgttaagaggtgtatagtcagcgtccactgtgggtgcccagagcccaatccctcggggaaaccctgggaggtgcacctgtggcactgcacctcgtaggccagcagagggctgaaggagtttgggtagtcatacacctgtttccacgggtcactgaggcattcatgctctggtcctcttggcttgcaggcacactggcaaaggggccttctgtagtgtaagaaaatgttcttggcaaagacctgcagatactcccatgtggaacttgggggagtagtcaggcccaaggtacaggagtaggacaccaatatttgtaacatacctagatggtctgctcaaggtgtgttacaatagactggggcagggcccatcactaggagactcacttccaagggctccagaaccctctctccctttccacctcctgttgccagcatgcccatccctgccattcttggttcactctatctatgcattgcttctctgtgtgtgtcccttggctgctcaaggttgctgggacaatcacacccaccatctcacctgactcaggagaagcaggaagtgatgtaagtccaggtgagtggctggttaagctgtgtgtgctgctaacttagggtaaggcaaggtgctcaggtggtggatgggcagtttctcccatttattcccacagagcaaataaaacaaaatcctttgttacattgtctgtcctaacttagggttcagcaaaacatgatctgagctgcaggattcctgaccccttgacagctcgtggatttctcttcccaagacattcttctgccagactatgccaaggactctgtgtcctttcttgaaccctgacatgtccctgaccc

SEQ ID NO: 752 - DNA, 38180 bp, Homo sapiens
gtcagggaggtccttgtcaacctgaggctggagattgtttgtgtacctgtgggtccaggattgggctgggtggacctctgagccttctctcacccttaaaggcactactcctgtgtgtgaggacatcggacgcagcctcctgacctatggccgccgcatccccctggctgaatgggaaagccggattgcggtaacatggacccctgggagaggttctggagtcttggcctggcagacacctgggaggtgtagggttggggcctggcatagcgcagcctgctcctataggcatccctggtgtcctaggcagctgtcacctgcaggggtagcatagtgggagggcagggcataggtgctgatggctgtggagatgggcggggcccatggaggtctatagcagggatcccttctgcctttcctcttttgggctggggacagctgcatgctgcctgtgggagatctctgctagttggatgatgctgactggctgaggtggtggccaggtgcccgttagccagtatgccctctgcctcaccctgcaggaggtggatgccagtgtggtacgtgagatctgctccaagtacatctatgaccagtgcccagcagtggctggatatggtaagtggcctagggggtctgctctttgtttatttcctcaggccgttctcttggcctccccttccacctctgctcccgcactgctgctcagcttacagagcagccagttaaggccccaagcagctctccccagtcccctggctgccagggagttcttgctcagaaaacctgtcccagcagttccttgactgcctgccaaggtgccttcatcaataccctgcacccgtcaggtaacgggcacctccatgtggggtggggcttcaagggccagaacatgaagggacaggctcagcacccctgggggaatgttctctcctctctttccactcaaagcctgtcttgtgctgctctgggcagcatctccgagctgggtgcggcacagggccaggtgtccctgtgcaggccaggtaccccaccctgacgctccaccctatccccacaggccccattgagcagctcccagactacaaccggatccgtagcggcatgttctggctgcgcttctaggcgggaagcctatgtaagcaagagggcagggccggggtttgtggtcccccccccaccacaaacacagcacttcggctcctctaacctgtgccacaggtgaccaccaataaaatcctctgctgagaagtgtgtcatccctcttttggcattggcatggagtccatggggcagtagatggggagcaaggacttccctctagttctgtggctcctggatcctcctgccttcccacaggctgatgtgtcctcagccaggggcaagcgtgggggttgcagctgaggccggaagtctttgatgcctacagggagctgagcccagatgtttccactcagccacttaggggagttcctcagccagctggtcccaagattgggctgtgggagtccataggaagtgtaaacccagcctttgcccctgtaggagtcccagcctggaatccctgcaggctcaggtgggaaacccctcactgtggaccttgtgccaagtcaccccctggtggtccctggtggaccagaaggggccaaggggtgtctccaaggatgcctcttgtgtgtgtttactctgcattctgggaggaggatagcctggggcatagtgttctcatttggtttctaactgctgcctggacaagcagggcaggaatcctttgcctccgctgactcaggctccaagaatagccctgagctcagtggggcccgagccccctccctctactacatttgtcccaggcaagtccagagctgctggcctgacaatcccctccccattttcctgaggcagccaggacctggtacagctcttagctacctagtccctctgttatctcttttggctctggtccccatggtgggtgcgcaggtaggctgctcctcctgcaccccccagtgcttccacagtcaggttctctgggatcccagggggaagttgaaagcgaggggcccaattttcctttgaggaagtcgctgcctggcagtcacaagcagggtgctgggacaaggtcttttagaagatggctgttcagaagtccccccagcatcgtagcttggaagtagcccaaggaacccttgtatcactatcaccctgccccactgcctttccctcaccattggttgccatacgttgccaattcggagacatttgttaagcaccttctacggcccgggactggggcattgcgcagatcattctactttgtgaacggctggagagaagatgctgggcagcgcagaaccctgacaggcccaaccctgggtgctcatggaggtgcaacacccaggcaggggaacaagtgccaagtctgttgtcaagtttgagctcctggaggatggggcttcatttctaagcccagcctggcccttagaggctacaggtgtgctggacacgagagcttgagttgctgggagtggtctggttctaagggaccttgcgtaccaagccagggactctggtctttaccctggagccatgctggggaggtgtgttggaggttactgtgaagagaagtgacttggtcagagttgagattcagcatggggactctcaggccatatttctgtatcagtcttggtgagctgtgctgtggcagaacagaggtcatggccacacgaactggagccagctgtaggggacacaaagaggactacattcccagcagggctgggagacgcggaggcacgagtgggttggaggagggtaatcttccatagtccagtgaggagtttggtggtgtccagggtacagtgggatgtgtggggctgggacctgataaagaggccctggttggaaacagatggggtgaggtagtgactgaggccagggaaggaaatgttcagggaaagcttgggagggagaaggatgtgctctgggggctccaccgccctgatggggttgcaggtaggcactggcctcgggctgtgccctaggctgtgttcctcccaggaggccagagctggggcttcagagggccacactcctgctcgtgagtctcatagaagctccagacgtggagtcattccaaccttactcctaccttctcaacagcctctcccagcaccctttgagagaccctctcacagcagcctgtcctttcttttggaggcacctcaattctgatgaggtttgcctgagcacccaccctcccagctgggcctcctgtctcccctaagactggcccacgtgtgcacatatgtctgtaccgtactgtccatgccactggcctgctcttgcccgccctggctgcacgggaggaggtgacagtcttagggggaaggggctgcctgtgtgataacatacctggttctctgcagccccccacctggagcacaccttgcagggatggggggtcctgggacatggctgaggagaccctgaccttggaataaggtcatagcactatgccccaggatagtttggggggtcagtaataagggatagagccccagccttccttgggcaataggaaagcaggcagcatggatggtcttcactgcctccagctctggccacaccagagtcctcgggctgtggaggagtccagccagtgctgtccccatatctccctgtggatcccaggggaggctgtggggccgggcatattagaaggggcccagcagccttggtgagtatagatgtgctttctgggctgcccagagttattcaggattagcaggaaaaaaagggggagcaggacccagatgggggcctgcccttcttagcagtgcctctctgccttagtgtcacccatctaatggagagatatgcatatacagagccccacctccttcggacagtggccctggcgtggtgtgtgttggaggactgtccacagcctcagaagcgaagctgggggagggtgtgaagtcagcctgggtaaggggacaggagtaaggtagggggcagttatgaagctggaagctacaggtaccatgagggcagtgaggaaaggaggaaggggcccaaggggacctcggcctggtaggggagatgggtggcagggacctacaagaaaagtagatggaaggagaggatgcctgtgggtgaggacatgtaggtagggggacctggcctggggcatggagggctcgattcctgagagatgagctgtcactgtgggtggtcccgccctccacagatgggcggccccctccctgcaggcacagctggattgcatctgcctgtgacatggtaggggatgtgggacactgggatgtatgcataagcatgacacaggttctctcctccttccggcttatcccctacaaagagggggtgagttacttggatccaggccaaggggaccttggtttccctaagaccggcccagagtcactcatttgccagggcttcttgcctgtcaaggagatccgggtggggcccaggaggcccaccagacagatggctgaatcacaggagtggccggcgggacccatggcctgagggcttgtctgggcacccccactggattgggggtgagtcatccccaactgcagccccaccccccacggcgctgctgccttgtggctctgcaggaacctgtccactcctcagcctggtcactgtgattgacctaaagcagccaagacctgtgaccttagatggagttaggggtactccctcagcatctgcccatgcagaaccttctgggaaattcccagaagccacggggggtcggggggtttatagttaagtgcgtcatatcgtttgtctgggggaggggtggggggggcggcgacctctcagggatatgggtgagggcgggtgcctgggttcccgcctgccgctccgccccccgagatcagggacttttctctgctctgcccgagagactgcagcggcggcggcgggagcgggcggacgcgcaggcaagaccaggactcgggctggaggggcgctgggctcggacctgccaaggccacgggggagcaagggacagaggcgggggtcctagctgacggcttttactgcctaggatgacgctgcggcttctggtggccgcgctctgcgccgggatcctggcagaggcgccccgagtgcgagcccagcacagggagagaggtgggcaccgcaagggaggacccggcccggggcactgcaccgtgccaccctccgctccactcggccttcatccccaacaccccccgcccacaacccagccaactccacgacgccccgcggattcctcctaattctgggactccccgaaccctccgcgatcggtgctgggttccctaaaccgcctcctatcctgttcctacccaaattctggctccctggatgcgtgcggggtcccctgccttatgccaatccacgccggcccctagaggctgacctcagtcccaagtccacacccgtgctggcgactctccctcccccgcacacccccaaccctccgcgggagtctgctctgggacccaccgagctcaactccctccaaggccctcaggctcaggccgattcggccctggtttgcataagatgaggcctactctccccaccatcccaagtcccagtgaggccaccgtgcgggtaggcgggtggttggcctcccagaagaggccctgatctctcctgcccgccccagtgacctgcacgcgcctttacgccgctgacattgtgttcttactggatggctcctcatccattggccgcagcaatttccgcgaggtccgcagctttctcgaagggctggtgctgcctttctctggagcagccagtgcacagggtgtgcgctttgccacagtgcagtacagcgatgacccacggtgagtaggggccctgggggctggggaccacgagatccccaccaagactccttccccagagagggaggagaccctggaaaccccaggccaggtctttgcagaaacaagttttggggaacctagagaccccctagccaggacctcctttggagacagaggtaaggattccctaggtagaaccttcgtgccctgaggcacctccaggctactgcaagacaggaaggtgcaagacagtgaggctgtgttttctgatctggagatggggagcccaggagggggcccccacgcctgttggattctccacgttctagccctctaacccttgcagccgttcaccagaggtgctccatctggccagcatccactttcctacatctggacccctcctcctgcaattatttaattaagcagcatcttgttccccacagactgtgagcccctaagggctccttcaggtctgcccaggcccacctgcagatggtgcacaaaggagcccctggggagtttgttaacctgggggttccagaggcaagtgggtgtggagaatgacagaacgaagggacccctcaagagagcctgatacccgtaaccctcaccctagaggcctcctcaaggccagggccagaagagatcctgagtcctagcctgttgccacccctaccctccaacaggacagagttcggcctggatgcacttggctctgggggtgatgtgatccgcgccatccgtgagcttagctacaaggggggcaacactcgcacaggggctgcaattctccatgtggctgaccatgtcttcctgccccagctggcccgacctggtgtccccaaggtgatccctacccctaccatgcctcccaagatgaccccaaatgaagtgtccaggggaaccgtgatttgacccctgcacctgtcccaggtctgcatcctgatcacagacgggaagtcccaggacctggtggacacagctgcccaaaggctgaaggggcagggggtcaagctatttgctgtgggtaaggaccgagcaggagtgacaggtcagctggggggtgggggcagtcagagagcatgtgggtgactgagtcctgatgggtcgtcacttcagggatcaagaatgctgaccctgaggagctgaagcgagttgcctcacagcccaccagtgacttcttcttcttcgtcaatgacttcagcatcttgaggacactactgcccctcgtttcccggagagtgtgcacgactgctggtggcgtgcctgtgacccgacctcgtgagttcctgcccacacggtgtaccctgacctagaccccggaccccaatccccacttggcagtgctgattccatcctatgtgctcctgaccccgaccccaactctgcatcatacatgcccaccccaatcctcctgcctgatcccctgatcccgcattcccagcggatgactcgacctctgctccacgagacctggtgctgtctgagccaagcagccaatccttgagagtacagtggacagcggccagtggccctgtgactggctacaaggtccagtacactcctctgacggggctgggacagccactgccgagtgagcggcaggaggtaggatgtcaggagtgataggtggtggctggggacttggctgggcaagataaagtgacctcttgccctgggcaggtgaacgtcccagctggtgagaccagtgtgcggctgcggggtctccggccactgaccgagtaccaagtgactgtgattgccctctacgccaacagcatcggggaggctgtgagcgggacagctcggaccagtgagcaattctgccagcctctgaccccattcacctaacccccgaccccagtaccccctcccacttctgactccatgaatccctggtgggactctcccccagctgccctagaagggccggaactgaccatccagaataccacagcccacagcctcctggtggcctggcggagtgtgccaggtgccactggctaccgtgtgacatggcgggtcctcagtggtgagtgagagatgtgggctgaggggagtccccgcgcctcagacaaggctgtagagtcctgagtctgcaaggcccactggccccttggtgtcccccatgcaggtgggcccacacagcagcaggagctgggccctgggcagggttcagtgttgctgcgtgacttggagcctggcacggactatgaggtgaccgtgagcaccctatttggccgcagtgtggggcccgccacttccctgatggctcgcactggtgagaaggctgggcactttcttcaggctgggacgggcaggcagggcaaggcccggaggccactgacatcccatgtgccctgggcagacgcttctgttgagcagaccctgcgcccggtcatcctgggccccacatccatcctcctttcctggaacttggtgcctgaggcccgtggctaccggttggaatggcggcgtgagactggtcagtgcgggggaagggatggacaggcaagggtcagggcatggcctctgctggtctgaccctgttatcttgcaggcttggagccaccgcagaaggtggtactgccctctgatgtgacccgctaccagttggatgggctgcagccgggcactgagtaccgcctcacactctacactctgctggagggccacgaggtggccacccctgcaaccgtggttcccactggtgagggctctgtgggctgggccagtgagtgggggaggtgtcggagccccaggctgcctctatgctgtgctctccaacaggaccagagctgcctgtgagccctgtaacagacctgcaagccaccgagctgcccgggcagcgggtgcgagtgtcctggagcccagtccctggtgccacccagtaccgcatcattgtgcgcagcacccagggtgaggtggacgcagccagcacccccaccacacacactgaagttccagcctgaggggtctgagtgtacctccagccctctccttccacacctgggtccctatagtctcctccctgtctcgttatccatctgcttcccaagatggcactgagccctgaactgtcaacagggtgtgtctgcccctaccctaccccaaccaatctcctccctgccccacaccccatccacggctttcacctctgcacagccacaagctcaatcacctgtctttctgttaccctagtggtgaccactgtacaccaacctctcattgcatgtccccatccagcactgacctctgccatcccacatcagtgtctgtcaatggctcatcagttctcactgcagtccactgactcctgtcatcctacatgctaagatcccacagactcctgtcctccagtgtccctgaccatcactggcccctttcatcctatgtccttgtcttgcactcacttttttcagccatatcccagctctctggtccccaccaccccacatccccacccccatggcccttctcactctgcgtccctgtccatcactgccatcgtcccacatccctgtctctttctgacccctgcccacctaccctgacttctctcttaggggttgagcggaccctggtgcttcctgggagtcagacagcattcgacttggatgacgttcaggctgggcttagctacactgtgcgggtgtctgctcgagtgggtccccgtgagggcagtgccagtgtcctcactgtccgccggggtgagtactgcaggaggcttgtggaggacagctgcctgcctcactctggtcctggttctgacttctgacttctgtctgtaactcctagagccggaaactccacttgctgttccagggctgcgggttgtggtgtcagatgcaacgcgagtgagggtggcctggggacccgtccctggagccagtggatttcggattagctggagcacaggcagtggtcagtgtggggtgtgtggggggactgccaaagggaccaatgagggtatgggtgccagaggggacaggcaggagccatgccagcatttccctctgacctcaggtccggagtccagccagacactgcccccagactctactgccacagacatcacagggctgcagcctggaaccacctaccaggtggctgtgtcggtactgcgaggcagagaggagggccctgctgcagtcatcgtggctcgaacgggtcaggccctgcccccgtcccttggctctctgcctccattgctctttcagacccccatgccttcccttgcagacccttgcttctccccagaactcctgcctcccccttcagaatcccactccctcctccctcagagacgctgcttcctcttcagtttcagctgtctccccttaagccctccccgtattcagattcctccgcttctctcctaagactcccacagcctttgccctcaaatatccaccacttcaaccctcagacccccatcccttttttgctggacccaaatctcctctgagatttacactttctcctccatcagacctgctcactgcttcctaaaacctccacctccccactcctccactggacctattcaccatctcctctatcaaattcccgtctcctgttagactcccatcatcttcccctatcagatagccccactccttcctgcctgttccagcagactccccattgcctctccccactagacccactgggcccagtgaggacggtccatgtgactcaggccagcagctcatctgtcaccattacctggaccagggttcctggcgccacaggatacagggtttcctggcactcagcccacggtggggactggggtttgggagggggcaggtcagggtggaatgggggctgggggtttattgggggtccaggtggggctctggggcacagagtttgctagccctggagctgcctccatccctgttcccaggcccagagaaatcccagttggtttctggggaggccacggtggctgagctggatggactggagccagatactgagtatacggtgcatgtgagggcccatgtggctggcgtggatgggccccctgcctctgtggttgtgaggactggtgagtggaccctggccagctactagccacaccgcattagctaccctgccctgctgtgtgttcctgattgcccagctgcctccacccccctgctcagtgactgtcctgtccacactgacccaccccacactgattaagtgtccacccacggtgacctcctggtggccccacactgcccaccccaaggcactgacctcctcctcctcagggctgcctaaagtgacctgtccacactaacctcacactgactttcagatcacccctgcgtcaaccattcctgcactgcctctctgttctctaccaggaccccttaccttgcctctgtccccagcccctgagcctgtgggtcgtgtgtcgaggctgcagatcctcaatgcttccagcgacgttctacggatcacctgggtaggggtcactggagccacagcttacagactggcctggggccggagtgaaggtatggctccctgacgccacccctgtccttcctggctgggactgctcacccctaaccattgctgtatgcccacctggccaggcggccccatgaggcaccagatactcccaggaaacacagactctgcagagatccggggtctcgaaggtggagtcagctactcagtgcgagtgactgcacttgtcggggaccgcgagggcacacctgtctccattgttgtcactacgcgtaggcagagcatgcgctggagagcttcggatgggtggtgtggatggtttggggatccgggcttgtgctctggattggagaaaggaccaggattggtagtgagcctttgggggcagggtctgagaggagggagaggggtctgagaggctgggcggggtgcgtgtgccagggtgggcctgggattggtgcaggggccatgggggcagagcctccctgattcctgagctttctctccagcgcctgaggctccgccagccctggggacgcttcacgtggtgcagcgcggggagcactcgctgaggctgcgctgggagccggtgcccagagcgcagggcttccttctgcactggcaacctgagggtgagaggtgtccccaggaggaagttagggaccattgggggcagggctgtggcagactccgcaaggtaggcgaggacagtgatggtgggcggggtctgtcactgggggtctgcgggatccgtgacagtaggtaagatcaatcaatgaagtgggtgggatcaatgagttcatggagggtcagtctggcagggtccgtaaagtgggcagggtcagtgaggatgaggaagatcagtcaggagggtgaacccagttaacagagccagtgaagtgggcaggccctttaatgcccccaggtgtcactatcccacatgctcttggcccccaccctcacgcctgccccaggtggccaggaacagtcccgggtcctggggcccgagctcagcagctatcacctggacgggctggagccagcgacacagtaccgcgtgaggctgagtgtcctagggccagctggagaagggccctctgcagaggtgactgcgcgcactggtaagcctgcctcaccttggcgtgctcctcccctgctgatgacccaccctgacttcctgcaccccgactctgagtgactcctcctgtacccctacccctcaccctctgaccctgggtgaccccagcatgacctcccatgatgcttcaataagacaaaccggacccaggatctcagatctctcccttctgggttctcaggactcagcctctgatcctcgatctttcattcctccttcagagtcacctcgtgttccaagcattgaactacgtgtggtggacacctcgatcgactcggtgactttggcctggactccagtgtccagggcatccagctacatcctatcctggcggccactcagaggccctggccagggtgagggggaggccaggatttgggtgggctggcagttggggctctgtggagacagctttttaatcaagttctgtctcctgcagaagtgcctgggtccccgcagacacttccagggatctcaagctcccagcgggtgacagggctagagcctggcgtctcttacatcttctccctgacgcctgtcctggatggtgtgcggggtcctgaggcatctgtcacacagacgccaggtatagtgggcgtagtgggaagggcagaaaggtgtgtctgggtgggctgcccgcttcagtaacttgttccccttcctacagtgtgcccccgtggcctggcggatgtggtgttcctaccacatgccactcaagacaatgctcaccgtgcggaggctacgaggagggtcctggagcgtctggtgttggcacttgggcctcttgggccacaggcagttcaggtttggccctggggcagccagattctacctctccctgaggccccccacccaggctccataccagttaccatctcctgaccacccaataggttcaggcattctcccagctctctcacaggctccagacctcacctactgcctggctccctatcctgccatcactgctgactccctaatagatagggtttggtcacacacaccctgatgtgtttctccaggctctgtgcacccccatccctgctctgtcatcctcctcaggctctgtgtttccttccaccccaggttggcctgctgtcttacagtcatcggccctccccactgttcccactgaatggctcccatgaccttggcattatcttgcaaaggatccgtgacatgccctacatggacccaagtgggaacaacctgggtgaggactgcagcaggcatggactcctggggctatccactgggagcttggtgccccagggttctgacatgtccttccttccaggcacagccgtggtcacagctcacagatacatgttggcaccagatgctcctgggcgccgccagcacgtaccaggggtgatggttctgctagtggatgaacccttgagaggtgacatattcagccccatccgtgaggcccaggcttctggtaaggagtaggctgatggggaaggggtctgggaataggggtggccctgaaaaggctatcatgcagccactggaccccaccttagggcttaatgtggtgatgttgggaatggctggagcggacccagagcagctgcgtcgcttggcgccgggtatggactctgtccagaccttcttcgccgtggatgatgggccaagcctggaccaggcagtcagtggtctggccacagccctgtgtcaggcatccttcactactcaggtttggaagaggcctctgggggactgggtggtagaatataaggggtctgggggttcttggtagaaatgttcaacctcaaagagaccctatgtccgcagccccggccagagccctgcccagtgtattgtccaaaggtaagagtccctcatcgagaggtgaacagaggctgcacctggggctagccactctgacccacatctgacatgtctttccccagggccagaagggggaacctggagagatggtgagtgcccctgcgggcggggaatagagaatgggttgagtgtcagtggggcaggagaggttggcagcacaggtctcactgattacccttcctagggcctgagaggacaagttgggcctcctggcgaccctggcctcccggtgagtgtcccccacatctgtccctgcaccctgactggcttatccccacctaactgctatcttctttcagggcaggaccggtgctcccggcccccaggggccccctggaagtgccactgccaagggcgagagggtgagtgtggagaccatcgaggtttctctgaggcactcctcaaagctgtctcggggtttttacaagagagaaggaagaagcagagttagaatcatcgggaattcctagaagcccagctggaggttataaaccaccacagagactttgggggacactctgaaatagaagggccagtggggcctctagccccgctgcagagcctgagcagcagctccaagtcccagaggcagggaagccctctgccttgtcgctgcccttgtgcctggaattgggctctgtgaagctctgaggggccatttctctgcctcactgttccacccccaataacacttgggggtcagtggggtaggcgaccccttgttgatggggtgaggcccctccagcaaaccaggggccttgggggagggtcccttcctgtcctgacctcttcacctcctcagggcttccctggagcagatgggcgtccaggcagccctggccgcgccgggaatcctgggacccctggagcccctggcctaaaggtgagcaagccttgtcctgcaggtcagggtgggcgctgcctgagtgggtggggtggctccgactgttctgcctctggcctccatttgcagggctctccagggttgcctggccctcgtggggacccggtaaggtgccttcccttctttgctctctaagtgtcttcccagggttcttccacagggtgggagcctggggtggtggtgcagtgcccacgttgacattcgcctgagcccaagcaccaccctctgctctgtttcgtcctcagggagagcgaggacctcgaggcccaaagggggagccggtaggtgaagggggaagggaggcggccgggatgtcccagggaggagcaggactgccccacaccagaccctgtgcagggcctaaggcgcgaataggaatagctggacatgtctaggggcttcttccagctcaaggcccccatagcctgaatcctgcccactgctctctgtccttacagggggctcccggacaagtcatcggaggtgaaggacctgggcttcctgggcggaaaggggaccctggaccatcggtaagtgcagggtatgtggaggcaagtgatgtgtagtggggggaccaacacgaggggggcgagagtgaggtctgtggggttgcaccttatactttgtctcctccatcagggcccccctggacctcgtggaccactgggggacccaggaccccgtggccccccagggcttcctggaacagccatgaaggtgacagcctcatgagtgccatgtgatgcagagacctggtgaccccatttgaacccacataacccctgccagttactctggcccttgtgaccctttgattacccccatcctcaccatgacgcctcagttctcccaaaatccttgaaatccaattggaccccatgaccctcatcactcctggtatctttgggagtgaggtgtggcccagggtcatggggtcgtcatctgttttctagggtgacaaaggcgatcgtggggagcgggtaagtgagggacaggttgtgctaggggtggcttggagtctgattcccctgttcattccctgacctgctgttctctcccagggtccccctggaccaggtgaaggtggcattgctcctggggagcctgggctgccggtgaggggccttgaggctctgctgggggccctgctcaggggtgtgggtctctcctggggcagtggttgggtgctgggcttcatagttcttggctcatatttttactcacttcttcctagggtcttcccggaagccctggaccccaaggccccgttggcccccctggaaagaaaggagaaaaagtaggaaggctgacttgatgatgtcccagttctggggtgggaggctgcgtgctgggggcagggcctcccttcggtcttcccacccgtgtgtttctccttcagggtgactctgaggatggagctccaggcctcccaggacaacctgggtctccgggtgagcaggtgagtggaggggccagggattctgaatatggtgggcacagctccagcccctacctcaatcatcaaccactgctccatcctcatgcccaaacccaaatctctgaacccccaaattcatcccttccagggcccacggggacctcctggagctattggccccaaagtgagtaccagttgggggattcaggtgtgaggggtgctactctgggctccccatggtgttaggggaggctggaagataaggagataagagttccctccaggtcagaggtcgtggttttggagggggtggttggagtttgggaccccttgtctggggtttgacgttcaagccccgccaccaaccctctctctctctgtctttctctcaccctctctcttcagggtgaccggggctttccagggcccctgggtgaggctggagagaaggtaagtgcaacctggggggtgccaagggccctggaggatctgggcccaactcagctctgacctcttcttttccatcagggcgaacgtggacccccaggcccagcgggatcccgggtaaacccactggctgcaatgctcataccagctgacctggctgtgccctttctggttctgacttcttgcccttgacccctgctacccctgctcctcacccctcctcaatgaccacttatccctgctgatacaggctctaaccctcagccccagggacctggctttgaacctctgaccctgctgaactgaccttgattttcactgacctggtctctgttctcctgccaagtcttacccctgccaacctaaatcccaatcttccctgacccctctccagcccccaccccagcctctagccctgtctgtccatatcccccgtccccacccacctgcacagctcttcccttcctctcctccaggggctgccaggggttgctggacgtcctggagccaagggtcctgaagtgagtctgtgactgtggtgggaccaggagtgggacttttgtgtgtccctcccctttcccttcccctcctgggctcacactttctctacattcaggggccaccaggacccactggccgccaaggagagaaggtgggtcctcggctgggggtggcactgtctggtactagggatgtggcagatgggacactgggattttgggctcctaggtgactccctgacctgtccctgctcctatcctctctccacagggggagcctggtcgccctggggaccctgcagtggtggtgagtgacgggaggatggcgctctgagcacagcacagcccttgagcagtgaccctcctatagaacactatctgggctgtgattccacagtgctgggcccgtgagcaggctgggagctctgcggctctccttctgctagaacctgcccccagactcttggctatgatcctgtgaccccaagaccgccatgcaggtcatgagctctttgtgtcagtccattttgtataaccccttccctgctgtcagcggtgactctgtgacttctgggcggggactgagctgtatgacttccaattccatgtgacctccattccaatgaagactttgatcatacaaccccaaggcagggccaagctgtatctgtcctgtttgttttcagggacctgctgttgctggacccaaaggagaaaaggtaagcctggtatggggcaaggggaggtttctacagggttgaggtctaggtcatagggcctatctatgggacttggggggtcacaggacttgctgggtcagggggttaactggagcctgggactagcactgatggtctttgtcacctccagggagatgtggggcccgctgggcccagaggagctaccggagtccaaggggaacgggtaagtgaagcgaagtgtttagggggcagttggtgaaggttgtcttcctgacttcttatccttccatccacagggcccacccggcttggttcttcctggagaccctggccccaagggagaccctggagaccgggtgaatcaatgtgggaatggggagtgtgacagagggagatgaggtggtgggaccctgactaagtcctgccccccttctgtccccttcagggtcccattggccttactggcagagcaggacccccagtgagtacccgttaccctgggcaacctcaaggcttctggggtcccctccccttgagaactgcttgcttcgagcgtcctgcatcacctccctcttgcctcctccacagggtgactcagggcctcctggagagaagggagaccctgggcggcctggccccccaggacctgttggcccccgaggacgagatgtaagaggctggagtcgggggagtcatggcgggtaagggagtagggctgttgccagcatcatgggggttcttggaaccagggctgactctcatgtttcacagggtgaagttggagagaaaggtgacgagggtcctccggtgagactccttcccactgtggtttctgatcctttacccttgaactaggatcccagtaggctggtgctccaccagttcatccatccactccctgcctcctgtccagctgctgctcagacccttctctgtcccctctccctgagtgagttagatcctgactgccctgtgcagtatgacttttctctctatcaccagggtgacccgggtttgcctggaaaagcaggcgagcgtggccttcgggtgagtcttggcagagagaagtaacaggggtgatgggaggtgggcatgaaggtgataggaaaggctgaggggggtaaggggtgatgggagtccctgcagggaggcatggggtgatgggaacctctgatgtggattttggagtaatggggaacctggggcagtgtagcgggtcataggggcacctgcaaaatattgggagggtctgtctcaggccagctgctcttcttagggggcacctggagttcgggggcctgtgggtgaaaagggagaccagggagatcctggagaggatggacgaaatgtgagtcccagcctatgactcctcaccccaaccttaaccctccaaccagccaattcccaatacctgatcctaccccccaaccctgtaatgctaaaccctcccaatcttcacttcctttgacccctgcacacacgcatctgaaggctaccaacattcccatgagtcctcatggtgcttccaaagctctcccaaactgctgcctaccttgagtggccctgacccctgcctttctgcagggcagccctggatcatctggacccaagggtgaccgtggggagccggtgagtagggctggtgtcctgggctcagaagggatggagggtcccctggcgctgctgccagtgtgccttcacacaaggggtctggaggtccaggtgggaagcatggatggccacccatgcctgctgggggctggcattggggtgcttcggggaacttgggggcagagttgagcctggggcaaaccagagccatggcctgggacctgagggctcctattgactataatcatttcctttcccagggtcccccaggacccccgggacggctggtaagggctgcgctgggtctggtcctctgtcattgttctcacttgcccctttggctccacatcatgtcccctcattccttccactaactcccacttcccccactgtccctctgaaacctccgcggatccctggagcccctcacagaccctgtatcccctcgccaactcctcttccccttgttgagccattcttctcactggtcattccccccacaggtagacacaggacctggagccagagagaaggtattagggtctgtgggtggagggtaagaaagaccccagtgcccctcccagcaggttctaccttgggcatggcttggcttcaaggctgttcctcagcaagcttatctctgccacagggagagcctggggaccgcggacaagagggtcctcgagggcccaagggtgatcctggcctccctggagcccctggggaaagggtgagtgtgattggtcctcgggggtgcaggcatgggagggcctgctctgatttcttcctcccctatcctcagggcattgaagggtttcggggacccccaggcccacaggtgagtgatgcactttgccccgtctgccaagtccccatcttaccctcacctcttatctgaccctgttccctccagggggacccaggtgtccgaggcccagcaggagaaaaggtgagagggtgtgggggtttctcaggacatgagcctgggttatcagatccacctcagccttggtggcctcttaccactctattttccacagggtgaccggggtccccctgggctggatggccggagcggactggatgggaaaccaggagccgctgggccctctgggccgaatgtgagtcttggtagtcctgcctggttgtccccttcccctaccccttcacatgaggaccctagaccccagcctcattggttggtcttggccttgacgagctctggggcgagacctgttgtctgtgtcttctcccagagccctgcctgggtggggcatgttcttgccatgcaggccttaggctcacagggactagagcccctgaccccatgaccatgatgaactgactttgagtctctcctcagggtgctgcaggcaaagctggggacccagggagagacgtaagtgaggggagatgctgggacagagggggctcggggctgcgtaagctccaaccagatcatcatagtcacagcatccgagagagttggtggggggtcggttcagccttgcctttgggagggtctcagtccctggcacacaggttttagtagaatccccctttctgaccttctttgccttgggggtcttcataggccctccaagtcctgggggttcttcccttgggagtctcagcaggggcccccatccatggggtctgtgcctgagggatctcaatgggacctctcagtcctgggggtctctaccctggagggagatctttttggggtcctcttagtccatggggtgtgccccaagggatatctcagaggccctataaatcttaacaaagactttttccaggggcttccaggcctccgtggagaacagggcctccctggcccctctggtccccctggattaccggtgagaccagactttcatgttacccccttttcccccttactaccctcacccgatccccgacatccaaccagtgatctgttcccacagggaaagccaggcgaggatggcaaacctggcctgaatggaaaaaacgtgagtgtgtccagggcagctgcggcgaaacctgccaagaaacgccagcacacctacacagccaagatctgtagcaacacatgaggcacacgtgtagacacatgcatcctggcccagacatacagatgcatccagaaacatagtttttttttttttgagatggagtttcgctcttgttgcccaggttggagtgcagtggcacaatctcagctcactgcaaccttcgactctcgggttcaagtgattctcctgcctcaacctcccgagtaactgggattacaggcatgcgccaccatgcctggctaattttgtatttttagtagagatggggtttctccatgttagtcaggctgatcacaaactgacctcaggtgatccgcccgcctcggcctcctaaagtgctgggattacaggcgtgagccattgcgccaggcctggaaacatagttctatatgcacacacaggcagcctcacagacacatagggagttaggtgaatgggccaatttatgccaggatgggctgacacatgcccagataacccacagccataggcacaggtgaagagccacagacaggtcgacaggcacaaacacactggtgtgtagccacatttggggcacttagagacatgttgatacccagacacttccacccagactcatgtgctaagacatggacccaagaccgcatgtggacctgtgttgagacatggtgagacacacatggatggctctgacctgtgacatgtgctaggacatgctggcccatgactttatatggtcacccacacgcttatggtcatacacattgagctacacacaagagttgcagacagatgccaagacacatggctctcaaggcatgtataagcccatgctctttggagacatgtataagcccatgcccatatgcagacatgggccaagatgtgcaaacagaccaggacacacagacccatgggtacatgtactaagacacacatggatatgcacacacccaggacatgtggacgatcaccaacccagagatgcataaatgtggagctacctctagagagccagagtcaaaggacatgtgtgcagttgcctgttggggtgagcaggcctatgcaggcacacccttagacatgtagcagctcactcagacggccacaggccatgctccaagacacacacaaccatggagctacaggcacagaaatacagtcacagtcatctgaaatctagcaaggtagtgtcttgcagccagacaccagtgaatgtttgggctgatgtgagtcctctgcccacagggagaacctggggaccctggagaagacgggaggaaggtaaagtcccccacctggggtctctctggtctctgcttggagccatgcctgaagcatccttgtcttccttagggagagaaaggagattcaggcgcctctgggagagaagtgagtattggagttttctgcaacctctgacccctgaccctgaccctgggggaatatgactccactcttttctgaggtctcagggtgctgatgctggctgcatccttcacagggtcgtgatggccccaagggtgagcgtggagctcctggtatccttggaccccaggggcctccaggcctcccagggccagtgggccctcctggccaggtgagtgtcctgggtcattctgggacttcagagcattagaagccatgatgtttcaatgggcaaccctcctgggaagccatgggcctttgtgacccctttgtgttctgccgtatctcagggttttcctggtgtcccaggaggcacgggccccaaggtgagtgcggatgttgggtagggggcgtggtgagggggctgaccaggctgggggccatttccccacctggtcattcttgttttcagggtgaccgtggggagactggatccaaaggggagcaggtgaggcccccaccttttccacatgcccaggtagccacagcacccacatgtgcacatgcacacccataggctggttcctagcagtttgtcttcatctctccagggcctccctggagagcgtggcctgcgaggagagcctggaagtgtgccggtgagccaggcttgggatgtccccttgactctgttttgcatgcccattggggccaccttgccatccccttccccttgccatgaggctccataggttctgtgctgtgtgttcagtgccctgccccattggggttcttgtagcccacactcaagggaacttgggcagtggggacacaccagaaaggggctcccaggagtctccagccatgcctcaaccaagtgctaaagggtgctctgggcaagaggcctagggaaaagggtgtgaaggtgctttcctgaggccgtgcggggcagaaggcaggagcttctctgtcatgggcagcccttcacccagactttgtccccagaatgtggatcggttgctggaaactgctggcatcaaggtgggttgtttaggggctgggggtagggacaagtgggggcccttggggctagtggtgcccacaggcataggggctgcggcgacgcaccccgctcctctgacctcttgctgtccctcaggcatctgccctgcgggagatcgtggagacctgggatgagagctctggtagcttcctgcctgtgcccgaacggcgtcgaggccccaagggggactcaggcgaacagggccccccaggcaaggaggtgagcagaagtggctcagtgggttgtgccccgtggagtggggtgtagctgtacagccaccagcattctctcttccactcctgcagggccccatcggctttcctggagaacgcgggctgaagggcgaccgtggagaccctggccctcaggggccacctggtctggcccttggggagaggggcccccccgggccttccggccttgccggggagcctggaaagcctggtattcccgggctcccaggcagggctgggggtgtgggagaggcaggaaggccaggagagagggtgaggctgggggctggccaggagagtgagggaagaggggttgggaggggtgggaccccccatgggcttggccctcacccgctatttgcatttcagggagaacggggagagaaaggagaacgtggagaacaggtgggctgcgatgggcttcgtggggcaggctgtctggaggctgtgctggggctgccaccccattttcttgtttcctgcagggcagagatggccctcctggactccctggaacccctgggccccccggaccccctggccccaaggtgatcaccccatccctgccttagtcctgtgactagtgaccaggaagccacccttagcttggtccccagaaatatggtagtgtgtgccataaccctggaatttctgaccctataaccctctgtgatcctgagatctgtgatgactcccccatgcctctatgacagagacatctctcccctgtgaccttgtgtttgtaggtgtctgtggatgagccaggtcctggactctctggagaacagggaccccctggactcaagggtgctaaggtcagtgtgtggaatcagctcggggccaccctctgccatggcactagggactgacttgacatctcatccccacagggggagccgggcagcaatggtgaccaaggtcccaaaggagacagggtgaggcctctctccacccttccatagagtccccctcctttctgggggcacactagaggtggtgtgcatatgcacctgggcacgtggcagggactgggggctcagggcacgacactctgccttcagggtgtgccaggcatcaaaggagaccggggagagcctggaccgaggggtcaggacggcaacccggtaagtccttgcccaacagccacacatgtgcaagaaggtggctctcacatgtattgtcctgtgtgcagggctggggtctgtactgcctgggactgtctgggtcctgactctgtctagggggatggtgggtggaggggaagttggaactgggaaactaaggccttaaacctattctctgcagggtctaccaggagagcgtggtatggctgggcctgaagggaagccggtgagtggtggctgaagcacctggccccaggctccggaccctccgctaggtgctgctgctgctgtgtgtgtgcatgtctgtgtgtgtgtgtttgtgtgtacctgtgtctgtgtgcctctctgtgtgtgcctgcttgtgtgtgcctgtgtctgtgtgtgcctgtgtgtgcctgtgtctgtgtgtggttgtatgtggatgtgtgtgtgcaggcccgtgtgtgctatctatgagaggcagtccatgggtaggtattatctgtgactggaaagggtgaggtatggaaattgacccccaaggaaaaagcccccagaggttgggaacaggcccaagtgaggcccagattgaggctcatcagtgccctctctatgtagggtctgcagggtccaagaggcccccctggcccagtggtgagtacccaagaaccttcacctgtcttgcccccatcctgtgccctgccccagtgaccagtactgcctcagtttccttggtggggtgcggctaactccccctcatcagactctttttcgccacaacagggtggtcatggagaccctggaccacctggtgccccggtgagtgaccagggaacactgcctggtgagggtctggaagggctgggataggcattggccacagctgatgagccaggccttctctgtgttaatccctgagccctgttccctgcccttgacccttttctctagggtcttgctggccctgcaggaccccaaggaccttctggcctgaaggtgagtctaggtgtgtggataggaggaggaggctccttcaagctgtgtccatgcctggggtagtgtgcgccaacctcctgggctgtcatctcctgcaatgaggatgagctccaggagccctggccacgtgggctctgctcatgcagtctctgggttgtttgcagggggagcctggagagacaggacctccaggacgggtgagtggcctagctcacaggttagggtcatagggagatgggtggggttggcactgccctgaactttctcttcctccagggcctgactggacctactggagctgtgggacttcctggaccccccggcccttcaggccttgtggtgagtgagtccctgtggcccctgtagggacaccgtgttttcactccttggggcccatgttctctcatgtcgtcctgtgtccattgtcaccctgacatccgacttgttctccgtcagggtccacaggggtctccaggtttgcctggacaagtggtgagttctgggggtcaagggttgggctccaggggtcaagggtcgacaggcagccctgacagagctcttccctctcagggggagacagggaagccgggagccccaggtcgagatggtgccagtggaaaagatggagacagagggagccctggtgtgccagtatgtgttctgggggcagctcgctagggtgtggtgcccagctgtgggcctgaaatatgaggagtggggcagcaggggtggtggtggagaggcactgagttcctcacgctgctctgccataggggtcaccaggtctgcctggccctgtcggacctaaaggagaacctggccccacgggggcccctggacaggtgatctttgaccctgacttccaccccctgcagcaactcctctgcctcacccacaagcctgtttccaaatgccatgggggtggcagggtgggggcgggggaggaggaggaaactcactagcattccccacaggctgtggtcgggctccctggagcaaagggagagaaggtgagtgtgtgtggggctgccagtgagggggggtcaactggtgggggccaaggaatcccactgacctctcccccttaccagggagcccctggaggccttgctggagacctggtgggtgagccggtaagtagggaacttctgacagcagatgttctgggggtcctgtctctccagtggcctaacttctgaccttcgacccatagtttacccaccctcatgaccctcagctttcatagtagaccgcatatttaagctctggccccatgcctccctccggagtctcatctttctgtgactgatgcctgtgttgcctcctgacctctgtcaacagggagccaaaggtgaccgaggactgccagggccgcgaggcgagaaggtgaggtgggttggccctggggcctgactactgagcagagaaggctcagtccagacacccctcacctgccattctgtgcagggtgaagctggccgtgcaggggagcccggagaccctggggaagatgtgagtccggggcctaggcaagggcgagcctggcctgaggagtgtgatggcgggcataaggggccactcttgggccggggcacatgtctgagcccctgagtcgggctgcatgtcccaacatccaggagcctgctctctggatcacagggagccacacactgtcggcttccacactctgagctctgggggccctgtcttggcttctgtgtgcccatccttggtctgtttctcaccacatctgggcacacgtgtgctctggtctgatctcccagatcccaggacacacctgagttcttgtgaacctctccttggtcctgtgtttacaatcctcctttcccctgcccctggctgccagcgttcagcctgtggccatgcctgctctacccgggagtggacgtgttggggttcccctctgagcgcccgtgtgtccgcactcacgtctgtggagccagatgtctgcactcgcgtgtgggctccctgtgcctgtgccatgcctgaactcccacctgtctatggtagtatctgagcgtccctctgtctgtgctgtcctgagataggccatggtcatgtctgagctcctgtgagccaattcttggtcgcatgtctgagttcccatgtgttcatggtcacatcagaactcccctgggaatattttcagcccgtgtctgaactctgtgctcatgttcctaccctctcaaatgctgtttgctgggttttcttagggtcagaaaggggctccaggacccaaaggtttcaaggtatgtgtacccagaagggtccctgctggggtcctggtcgtgagactccctgagcttgatccgatgcctcttttcctcaaagggtgacccaggagtcggggtcccgggctcccctgggcctcctggccctccaggtgtgaaggtaagtcaatgccccatcaccagttgtaggggcagcaggccgggcccccacaggaggaagagggagttctgatgagagtcctgggaggggtcctgcattgaccattccctccctttgctgtttttatttcagggagatctgggcctccctggcctgcccggtgctcctggtgttgttgggttcccgggtcagacaggccctcgaggagagatgggtcagccaggccctagtggagagcgggtgaggggctgggaacagcatgtaggggcatggtgaatccatggtgggtgaggagggggccctgccttgggggttcccagtcttgagggggcagagggtaggagggttcccaagtcactctctgcctctcttgccccatttttctggtagggtctggcaggccccccagggagagaaggaatcccaggacccctggggccacctggaccaccggggtcagtggtgagtagaggtgccctaaagccccacgtatttgatttcctgtcctcgtgaggacttaggatggggcgggccacactgtggggtgttgggggaggcgctttgagagccacaggaccctcacctcactctgacctacagggaccacctggggcctctggactcaaaggagacaaggtaggtgggacaagtgctgctgactctctcttgtgccctggtcacccccttcagcctccactgacctcccatgaccctgcgtcccccactgattcccctcactgatccccggtgtcctgttggtctccagggagaccctggagtagggctgcctgggccccgaggcgagcgtggggagccaggcatccgggtacgtatgtcttactccacagccgaactcccttcatcccagctcttgcctctgatttccaacctctgagtcaatgaacctaatgtcaccatccagggtgaagatggccgccccggccaggagggaccccgaggactcacggtgggtcccgctggggaaagtgacagtgctgtgacttcagtcccctgcctgtgccctttgtaccccaggactctctgccatcctccctagccctctggccctcctcgtctacccctgtcccctttgtctggtccccactgtttccctcctccccctgatcctcctccgtcctccactgccctggttcctgtagctcacggtcaccttctctcacacaggggccccctggcagcaggggagagcgtggggagaaggtaggaacgtggggaaggtcctggcatgagtgggggggtgagtggatcttgtatgatattagaattcaggtgcggggcctccccagtttgggcgggactcacactcttttgcccaatagggtgatgttgggagtgcaggactaaagggtgacaaggtgagtgtgggcatggggagggcagggcaggggccagggtgctcccgactcctctgattcctgcctgccccctcagggagactcagctgtgatcctggggcctccaggcccacggggtgccaagggggacatggtgagtgggcccacgtgtggactgggtctcccctgggtgcgagagggaccccgtggggctggcccagggcatctgagagctcaaactcccagagggtgagggaccttcagccccttaccgtgacttcttacccaaaccaacccagggtgaacgagggcctcggggcttggatggtgacaaaggacctcggggagacaatggggaccctggtgacaaggtacagggaagagggtggtgtactctctgtggggtcctgtggctgtggtggttccacagcatctgtgagggcaggaggggaggacaggaggaggctttctggggtttagggggaaggggttctgtggctgactatggagtggccgagaggaggggctctagggagggctcaaggccttggtgtgaggttaggagagctctgtggactggccctatgaaggggccctatagggacaggaaaggggctccttgggtgtccccatctgaaggtgcttcagatgggatgaggaacccagtgataagagggcggggcaagggtctggagtccttggggtgagaaatgagccagtctgtggactacagcccccagttccacccgctatggcacaggctgggaggacgtgctgctagggccgttcgggagtgacttgagctctgccccagctggcgggctcgttgtattctaagcccccagcctgatctggtcctgactgaatccctctcctggtcactcccacagggcagcaagggagagcctggtgacaagggctcagccgggttgccaggactgcgtggactcctgggaccccaggcaagttctgccccaggcccaggcccaggcccaggtccagagccagcatcacacacacacatatcctgggggtcctcttaagtgctgggggttctggctcccttgctgccggccccatgtgtgttcacccgggatctgtgtgtggcctgggccctggccgctgagcatctgagtggccacacatgcagcggatgggccagtgttggggacagtcccactgaagggctcccccatctgtgtttctcacagggtcaacctggtgcagcagggatccctggtgacccggtaagatgcccctgctcccacaggggccccctgtccccagagggcccccgtcaccatggtggtcccaccagtgtggtagcttttgaccttatagtgacccagtgctctcatggtgtcctcatgtcacccagggtcccccacctccacagtagccgcctatgatggtgtcccctgcctatggtgacccttgtccccatggcaagccccagtggctctggcctccagaggtgactcccaccccatggtgttccctacccactatccagggcgattctctttggtccctcactgacctcctctgacctcacatggaccctctccctgctagggatccccaggaaaggatggagtgcctggtatccgaggagaaaaaggagatgttggcttcatgggtccccggggcctcaaggtaggaaagaaacaagattggtttttttctggtcaggaaggcctaatgttgaagggcgagggacctggggtcagatattagggcactgggtcagaggttggagtagctgaggcctgtttggagagttagtttcagggtgaagggggtcacagagtgaggtgtctgggaatcacttcttcatctgcttttctccctcagggtgaacggggagtgaagggagcctgtggccttgatggagagaagggagacaaggtacagaggggatgggggctggggggctacgtggcctggggcctaaggctcaccccactgcctgatgcctgcagggagaagctggtcccccaggccgccccgggctggcaggacacaaaggagagatggtgagtgtgggcacgctcagaatgagggggccacgggtggacgggggccaagttcatgtctttttttctccagggggagcctggtgtgccgggccagtcgggggcccctggcaaggagggcctgatcggtcccaaggtacagggtctgtggacagtggacatgacagggagtcaggatggggcagggaagctcatggtcgggtcatgggggtgtagggacaaggaaggctgtagagggttgggactttgggggctgaagtggggctggtctcgaggtgtcaaggtgggttggggtcacagtggagttaggatgaaagcatgggaggtggagggggcatgtgcatcagggcagggggctatagtggagttggagtcatggggatcacatctggttggctcacaggtgcttgggttacagaaggtttgggcattaggccagggagctcatgggagttcagggaggttccagagctgagggaggtcagggcagaaggtctctcatgcttcttctgttcccagggtgaccgaggctttgacgggcagccaggccccaagggtgaccagggcgagaaaggggagcgggtgagttgaagccatggtcatggtgaattgaggggagcgtgcactttgggagagggtccatctctggggcctctgattactgactctgtcctatatctccccagggaaccccaggaattgggggcttcccaggccccagtggaaatgatggctctgctggtcccccagggccacctggcagtgttggtcccagaggccccgaaggacttcagggccagaaggtaaggggccccagctctgactcctgatccctgaaccttccctacccttccaacctcataaccatcttccagcctgcctgccccaacctctgaagctgtggcccccaacctgcctgactctgatccccactgcctctgaccctgctcacttggtccctgtgtctgacagggtgagcgaggtccccccggagagagagtggtgggggctcctggggtccctggagctcctggcgagagaggggagcaggtgagtagggattccaaggcttgggtcagagatcggggtgacttctgttgtccctgaggtcagaggtcacagcctggtcccatctgttgcacataggggcggccagggcctgccggtcctcgaggcgagaagggagaagctgcactgacggtgagtgtgggcctggatgggcctgggagggcctgggtgggcctgggtgggctggggccctacctccctcacccagcaccctgacccctgggccctggctccatgcagtctcaccatagtccctgtattatgtgccctatgtccttcctgtgggccatgggttctttatggtccctgtggtcttctgctcccaggaggatgacatccggggctttgtgcgccaagagatgagtcagcactgtggtgagtggtgcccagcccgcagtctcccactccaccccagcaccctaggcaagggcaggcaggcccctagaacttacagggcaagcagtcaagaagatggggggatggatggatacacagaaggacacatgtgctgcaggactgacacatgacatgtgtccccagtggagggagacacacaggcagatgaggattgccatgcagtgctctcagatgtccagcttggctgtgtggggagtgggatgatggtgggagcagagctggtccccttgggcctgacctggacccggtgggaggggcatcagagtgaagctgtctcttcccgtctctgtctgcaccacctgcctgtttctgtgtctggcctgcttctgtctcttgccttttgttggcctgttcccaacttccctctcctctgccttcttctctttttccatctctctatctacctcccaccctctctcttcctctctctcctgttaccctctcctgctatctctttgtgtatctctacccctctgcctgtgtgtctctgtctgtctctccatcttcccatccttctctctgtcattgtctctctatccctctctgccccctctagcctgccagggccagttcatcgcatctggatcacgtgagtagttttctactcccagaactttcttcaccccaggccctgccctgcctatcaactggggtcctctcaggggggttggctgggatggctgcccatggtgacttcagggccctgaggcccctgctcttggctccaggacccctccctagttatgctgcagacactgccggctcccagctccatgctgtgcctgtgctccgcgtctctcatgcagaggaggaaggtgaggacagctgaacccgtggggcagctatgggtggggccgagacacgcacatgggtgtccatgaatgcagggcacacgccaagcacgtagggtctgcatgcagggcacacgcatgggcactgtgtgcacacagtggaaatcagtgctgcccaccttgccccggggccagcagccactgctcccagcacaccctgccctacctgcagagcgggtaccccctgaggatgatgagtactctgaatactccgagtattctgtggaggagtaccaggaccctgaagctccttgggatagtgatggtgagaatggggggctgccagcggggtctggggaggggcaggcagggctgagccctgctgacctccccctgacctttcaaccctctctgattcccacaaaccctgctgacttgaccccattggcccagacccctgttccctgccactggatgagggctcctgcactgcctacaccctgcgctggtaccatcgggctgtgacaggcagcacagaggcctgtcacccttttgtctatggtggctgtggagggaatgccaaccgttttgggacccgtgaggcctgcgagcgccgctgcccaccccgggtggtccagagccaggggacaggtatgggctgagcccccaccgtggggaactgggcactgagcctgcctggatcgggttctgggggaggagtccttgggccagggttccaggtcagggtcctggaggagacgctccctcgcagtaggggacctggggcagacgcccagaccaaagagctgaatatagagccccagccgtggagcccccagtagggtccccttccatgttccctcctttaaagacctaagtatggacccctctgaggtcagagcccccacttcctgttgtagcctccgctccctccccttggcggtgcctctgcctgagcgtctccggggaaggtcagatggctgacgaccgtttccaacctgtcctcaccaggtactgcccaggactgaggcccagataatgagctgagattcagcatcccctggaggagtcggggtctcagcagaaccccactgtccctccccttggtgctagaggcttgtgtgcacgtgagcgtgcgtgtgcacgtccgttatttcagtgacttggtcccgtgggtctagccttcccccctgtggacaaacccccattgtggctcctgccaccctggcagatgactcactgtgggggggtggctgtgggcagtgagcggatgtgactggcgtctgacccgccccttgacccaagcctgtgatgacatggtgctgattctggggggcattaaagctgctgttttaaaaggctcctgttgtgactgtttgggaagatggggggtttcaagggggaaggttttccttggggggttggtattattctgcatgggtacagagtccctctgcccagtcctggtcactgtcttgtgattctcagtccccaacttgtccccggaaaagagtagatagggtgggggctaaggacacccccgggagggatgagtcataggtggggggctgcctcatgccaggaagcatgtaccagctcccaccccagggggctgagggagataaatgggccctgaagcggggtagagggtcagaccacaggacagtagtgcctggccccagccccaggcagccacagcaggctgccttaccccagaagcagctggtggcggtaggactgggttgggtcgggatgggaagggtcttggaggttgagtggatgtggggtttggctttatggagggcttggacccaggggactctgggatctctggctgcttttctgcctctgagatccgattcctgcccttctgtttcctggatcagctgcaagctctcctgctgagaaccgcctgccctcctgtggactctgtgtttctgtctgaatctttctttccatcatgctgtctgtctctgggatggtttctgtctgtctttttcttctagtctccattttgctctgcctccatctccttcatctccctctcttgctgtccctctgtctctggatttctttgtttctttttttctgtcttgctttctgcctctttgtctcattctggctctcctcttgtctccccttctctgtctctggcctggcctggcctctctaacccctttctcggtgtcttcctctctctccatcccccgctctgtcactctgcccttgccatctgtctctgtccatggaccccagttgaccagagcccctgccctgagcccattttctccttgcagcctgacctcacgatgaccaggtgtgctctgctgttgctgatggtcctgatgttgggcagagtcctggttgtcccagtgacccctatcccaaccttccagctccgccctcagaattctccccagaccactccccgacctgcggcctcagagagcccctcagctgctcccacatggccgtgggctgcccagagccactgcagccccacccgccaccctggctcgcgcattgtcctatcgctggatgtccccatcggcctcttgcagatcttactggagcaagcccgggccagggctgccagggagcaggccaccaccaacgcccgcatcctggcccgtgtcggccactgctgagcctgagagagggggtcacagtgatagggccaccctggatgggaagacctggagggcagccacacagctggacggatgctgccacatctgggcatacagtgtctggacgctgccacatctgggcatacagtgtctggacactgccacatggagccactgtcatgcaggtcatatcagatctgagtgccccacagagtcacagtgtgtctggacagcctggacattggacattgctaagttgggtcactgccacatggagtcttgccatgcctgtgtgccccacagacctaatatatgtccggacagcttggatgctgccacgtaaggtcactgctgtggcgagtcttgctatgtctgggtgccccatagtcacagaacacctggacaccgccacatgcagtcatcatcatgttactttcaggagcctcaacacgagagctcaacactgcctccgaccagtccctctgaggcccacaggtctgtcatcccataggccaccacacagagaaatgctggctgagggtcacttgcttgctctgtgccccatgaggcagcacctgccccagatggacggggctgtgaggggtgtctccaggcacaaaggcccgaacacaggaagcctgtgaccatggcagccttgtcttatgggcgcatatgtgcgtgtgtggctgagtctctgacagctgtgagtgtgtgtgagcagggtaagggta

(The sequence listing continues in the following parts.)

What is claimed is:

1. A method for treating a disease or disorder caused by a mutation in a gene, the method comprising administering to a subject in need thereof and comprising the mutation in the gene an effective amount of a synthetic RNA encoding a gene-editing protein capable of creating a single-strand or double-strand break in the gene, wherein the single-strand or double-strand break causes persistent altered splicing of the gene.

2. The method of claim 1, wherein the altered splicing results in expression of a truncated protein which lacks at least the polypeptide sequence corresponding to an exon containing the mutation.

3. The method of claim 1, wherein the single-strand or double-strand break produces a non-functional splice acceptor site in or near an exon of the gene or a non-functional splice donor site in or near an exon of the gene.

4. The method of claim 1, wherein the gene-editing protein creates a non-functional splice acceptor site that is within about 1 kb or about 0.5 kb or about 0.1 kb of the exon.

5. The method of claim 1, wherein the mutation causes altered splicing of the gene and the single-strand or double-strand break causes the expression of a functional gene product.

6. The method of claim 1, wherein the mutation inactivates a splice acceptor site or a splice donor site and the single-strand or double-strand break restores a functional exon.

7. The method of claim 2 or claim 3, wherein the single-strand or double-strand break is within about 1 kb or about 0.5 kb or about 0.1 kb of the exon.

8. The method of any one of claims 1 to 6, wherein the non-functional splice acceptor site causes excision of the exon when a pre-mRNA comprising the exon is processed into mRNA.

9. The method of claim 1, wherein the gene-editing protein creates a non-functional splice donor site in an intron that is within about 1 kb or about 0.5 kb or about 0.1 kb of the exon.

10. The method of claim 1 or claim 9, wherein the non-functional splice donor site causes excision of the exon when a pre-mRNA comprising the exon is processed into mRNA.

11. The method of any one of claims 1 to 10, wherein the exon comprises a mutation.

12. The method of claim 11, wherein the mutation is a nonsense mutation, a frame shift mutation, or a mutation that introduces a premature stop codon.

13. The method of any one of claims 8 to 12, wherein the mRNA is translated into a truncated protein which retains a function of the full-length protein.

14. The method of any one of claims 1 to 10, wherein the exon encodes a polypeptide sequence comprising a peptide splice site.

15. The method of claim 14, wherein the mRNA is translated into a polypeptide which lacks the peptide splice site.

16. The method of any one of claims 1 to 10, wherein the exon encodes a polypeptide sequence comprising a cleavage site.

17. The method of claim 16, wherein the mRNA is translated into a polypeptide which lacks the cleavage site.

18. The method of any one of claims 1 to 17, wherein the truncated protein possesses a function of the wild-type protein.

19. The method of any one of claims 1 to 17, wherein the gene-editing protein is selected from a TALEN, a meganuclease, a nuclease, a zinc finger nuclease, a CRISPR-associated protein, CRISPR/Cas9, Cas9, xCas9, Cas12a (Cpf1), Cas13a, Cas14, CasX, CasY, a Class 1 Cas protein, a Class 2 Cas protein, and MAD7.

20. The method of any one of claims 1 to 17, wherein the gene-editing protein comprises:
(a) a DNA-binding domain comprising a plurality of repeat sequences and at least one of the repeat sequences comprises the amino acid sequence: LTPvQVVAIAwxyzGHGG (SEQ ID NO: 629), wherein:
“v” is Q, D or E,
“w” is S or N,
“x” is H, N, or I,
“y” is D, A, I, N, G, H, K, S, or null, and
“z” is GGKQALETVQRLLPVLCQD (SEQ ID NO: 630) or GGKQALETVQRLLPVLCQA (SEQ ID NO: 631); and
(b) a nuclease domain comprising a catalytic domain of a nuclease.

21. The method of claim 20, wherein the nuclease domain is capable of forming a dimer with another nuclease domain.

22. The method of claim 20 or claim 21, wherein the nuclease domain comprises the catalytic domain of a protein comprising the amino acid sequence of SEQ ID NO: 632.

23. The method of any one of claims 21 to 22, wherein at least one of the repeat sequences comprising the amino acid sequence LTPvQVVAIAwxyzGHGG (SEQ ID NO: 629) is between 36 and 39 amino acids long.

24. The method of any one of claims 1 to 22, wherein the gene is selected from ABCA4, ADAMTS-13, APP, ATP6AP2, CEP290, COL17A1, COL4A3, COL4A4, COL4A5, COL6A1, COL6A2, COL6A3, COL7A1, DMD, DMD, FUS, FXN, GABRG2, HNRPDL, HTT, IKBKAP, ITGA6, ITGB4, LAMA3, LAMB3, LAMC2, LMNA, LMNA, LMNA, LMNA, LMNB1, MAPT, PINK1, PRPF6, RBM20, RNU4ATAC, SMN1, SNRNP200, TARDP, TCF4, TTN, U2AF1, USH2A, and USH2A.

25. The method of any one of claims 1 to 24, wherein a gene, the sequence identifier (SEQ ID NO) for its NCBI Reference Sequence, a mutation or mutations therein, the intron or introns that are associated with diseases, and/or the exon or exons that are associated with diseases which can be treated by the method is selected from the list Table 2.

26. The method of any one of claims 1 to 24, wherein the disease or disorder is selected from Alport Syndrome, Alport Syndrome, Alport Syndrome, Alzheimer's disease, Amyotrophic lateral sclerosis (ALS), Amyotrophic lateral sclerosis (ALS), Autosomal dominant leukodystrophy (ADLD), Becker muscular dystrophy (BMD), Bethlem myopathy and Ullrich scleroatonic muscular dystrophy, Bethlem myopathy and Ullrich scleroatonic muscular dystrophy, Bethlem myopathy and Ullrich scleroatonic muscular dystrophy, Dilated cardiomyopathy (DCM), Dilated cardiomyopathy (DCM), Duchenne muscular dystrophy, Dystrophic Epidermolysis Bullosa, Early-onset Parkinson disease (PD), Epidermolysis Bullosa (EB), Familial dysautonomia (FD), Familial partial lipodystrophy type 2 (FPLD2), Febrile seizures (FS); childhood absence epilepsy (CAE), generalized epilepsy with febrile seizures plus (GEFS+), and Dravet syndrome (DS)/severe myoclonic epilepsy in infancy (SMEI), Friedreich ataxia, Frontotemporal dementia with parkinsonism chromosome 17 (FTDP-17), Fuchs endothelial corneal dystrophy (FECD), Huntington's Disease, Hutchinson-Gilford progeria syndrome (HGPS), Junctional Epidermolysis Bullosa, Junctional Epidermolysis Bullosa, Junctional Epidermolysis Bullosa, Junctional Epidermolysis Bullosa, Junctional Epidermolysis Bullosa, Junctional Epidermolysis Bullosa, Leber's congenital amaurosis (LCA), Limb girdle muscular dystrophy type 1B (LGMD1B), Limb-girdle muscular dystrophy 1G (LGMD1G), Microcephalic osteodysplastic primordial dwarfism type 1 (MOPD I), Myelodysplastic syndromes (MDS), Retinitis pigmentosa (adRP), Retinitis pigmentosa (adRP), Spinal muscular atrophy (SMA), Stargardt disease, Thrombotic thrombocytopenic purpura (TTP), Ushers syndrome type I, Ushers syndrome type II, Various myopathies and dystrophies, a wound, and X-linked parkinsonism with spasticity (XPDS).

27. The method of any one of claims 1 to 26, wherein a single administration of the effective amount of the synthetic RNA encoding the gene-editing protein causes persistent altered RNA splicing of the gene.

28. A method for treating a neurodegenerative disease or central nervous system injury comprising administering to a subject in need thereof a synthetic RNA encoding a neurotrophic agent, a gene-editing protein, or an enzyme that cleaves a dysfunctional, an abnormally folding, and/or a disease-causing protein, wherein the neurotrophic agent, the gene-editing protein, or the enzyme treats the neurodegenerative disease or central nervous system injury.

29. The method of claim 28, wherein the neurodegenerative disease is selected from: a motor neuron disease, a polyglutamine disease, a prion disease, a spinocerebellar ataxia, a trinucleotide repeat disorder, Alzheimer's disease, amyotrophic lateral sclerosis (ALS), ataxia telangiectasia, ataxia-oculomotor apraxia, Batten disease, Cockayne syndrome, dementia, familial encephalopathy, Huntington's disease, Lewy-body dementia, multiple system atrophy, Parkinson's disease, spinocerebellar ataxia type 1, spongiform encephalopathy, and xeroderma pigmentosum.

30. The method of claim 28, wherein the central nervous system injury is selected from: concussion, diffuse axonal injury, diffuse brain injury, focal brain injury, hemorrhage, seizure, stroke, traumatic brain injury, traumatic encephalopathy, and traumatic head injury.

31. The method of any of claims 28 to 30, wherein the administering is by intravenous injection or infusion; intra-arterial injection or infusion; intrathecal injection or infusion; intracerebral injection or infusion; injection or infusion into a ventricle, including a lateral ventricle; injection or infusion into the hippocampus; injection or infusion into the striatum; or injection or infusion into one or more of: the putamen, the caudate nucleus, the substantia nigra, the cortex, the third ventricle, the spinal cord, or the basal ganglia.

32. The method of any one of claims 28 to 30, wherein the synthetic RNA encodes a neurotrophic agent.

33. The method of claim 32, wherein the neurotrophic agent is a neurotrophic protein selected from nerve growth factor (NGF), brain-derived neurotrophic factor (BDNF), neurotrophin-3 (NT-3), neurotrophin-4 (NT-4), the GDNF family of ligands, and ciliary neurotrophic factor (CNTF).

34. The method of claim 33, wherein the neurotrophic protein is NGF and comprising the sequence of SEQ ID NO: 254, the neurotrophic protein is BDNF and comprising the sequence of SEQ ID NO: 561, the neurotrophic protein is NT-3 and comprising the sequence of SEQ ID NO: 255, the neurotrophic protein is NT-4 and comprising the sequence of SEQ ID NO: 256, the neurotrophic protein is CNTF and comprising the sequence of SEQ ID NO: 786, or the neurotrophic protein is GDNF family of ligands and comprising the sequence of SEQ ID NO: 787-793.

35. The method of claim 28, wherein the synthetic RNA encodes a gene-editing protein that targets a safe harbor locus.

36. The method of claim 35, wherein the gene-editing protein inserts a functional copy of a gene into the subject's cells.

37. The method of claim 36, wherein the inserted functional copy of a gene does not cause alterations of the subject's cell's genome which pose a risk to the subject.

38. The method of claim 36, wherein the gene encodes a neurotrophic agent.

39. The method of claim 36 or claim 38, wherein the gene encodes nerve growth factor (NGF), brain-derived neurotrophic factor (BDNF), neurotrophin-3 (NT-3), neurotrophin-4 (NT-4), the GDNF family of ligands, and ciliary neurotrophic factor (CNTF).

40. The method of claim 39, wherein the NGF comprises the sequence of SEQ ID NO: 254, the BDNF comprises the sequence of SEQ ID NO: 561, the NT-3 comprises the sequence of SEQ ID NO: 255, the NT-4 comprises the sequence of SEQ ID NO: 256, the CNTF comprises the sequence of SEQ ID NO: 786, or the GDNF family of ligands comprises the sequence of SEQ ID NO: 787-793.

41. The method of any one of claims 36 to 40, wherein the gene is inserted downstream of one or more of: a simple promoter, a constitutive promoter, a strong promoter, an endogenous promoter, or a drug-inducible promoter.

42. The method of any one of claims 28 to 41, wherein the method induces neurogenesis.

43. The method of claim 28 or claim 29, wherein the synthetic RNA encodes an enzyme that cleaves a dysfunctional, abnormally folding, and/or a disease-causing protein.

44. The method of claim 43, wherein the dysfunctional, abnormally folding, and/or disease-causing protein forms a glial scar.

45. The method of claim 43 or claim 44, wherein the dysfunctional, abnormally folding, and/or disease-causing protein is tau, alpha-synuclein, or huntingtin.

46. The method of any one of claims 43 to 45, wherein the administering is by intravenous injection or infusion; intra-arterial injection or infusion; intrathecal injection or infusion; intracerebral injection or infusion; injection or infusion into a ventricle, including a lateral ventricle; injection or infusion into the hippocampus; injection or infusion into the striatum; or injection or infusion into one or more of: the putamen, the caudate nucleus, the substantia nigra, the cortex, the third ventricle, the spinal cord, or the basal ganglia.

47. The method of any one of claims 43 to 45, wherein the administering is directly to a target tissue.

48. The method of claim 47, wherein the administering is directly to a site of disease or injury.

49. The method of any one of claims 28 to 48, wherein the synthetic RNA is not encapsulated in a viral particle.

50. The method of any one of claims 28 to 49, wherein the synthetic RNA is formulated in a liposome or lipid particle.

51. A method for treating and/or reducing pain comprising administering to a subject in need thereof an effective amount of a synthetic RNA encoding a gene-editing protein capable of creating a single-strand or double-strand break in a voltage-gated sodium channel type 1 (NaV1) gene, wherein the administering is directed to the central nervous system (CNS) or the peripheral nervous system (PNS).

52. The method of claim 51, wherein the NaV1 is selected from NaV1.3, NaV1.7, NaV1.8, and NaV1.9.

53. The method of claim 52, wherein the NaV1.3 is encoded by the SCN3A gene comprising the sequence of SEQ ID NO: 671, the NaV1.7 is encoded by the SC9N9A gene comprising the sequence of SEQ ID NO: 662, the NaV1.8 is encoded by the SCN10A gene comprising the sequences of SEQ ID NO: 672, and the NaV1.9 is encoded by the SCN11A gene comprising the sequences of SEQ ID NO: 673.

54. The method of claim 51 or claim 52, wherein the administering is directed to neurons and/or glial cells of the CNS or PNS.

55. The method of any one of claims 51 to 54, wherein the administering is by intraganglionic injection, injection to the peripheral or central nerve roots, or injection in proximity to the dorsal root ganglion or nerve root.

56. The method of any one of claims 51 to 54, wherein the administering is directed into the parenchyma or the cerebrospinal spinal fluid of the central nervous system.

57. The method of any one of claims 51 to 56, wherein the synthetic RNA encoding a gene-editing protein is administered systemically and its penetrance to the CNS or PNS is increased by encapsulation in a viral or non-viral particle, by electrical stimulation, by acoustical stimulation, and/or by co-administration with a drug.

58. The method of any one of claims 51 to 57, wherein the RNA comprises or encodes a transport signal that directs the RNA or a protein product to a neuron's cell body or to a distal portion of the neuron.

59. The method of any one of claims 52 to 58, wherein the synthetic RNA encoding a gene-editing protein decreases expression of a wild-type or a mutant form of NaV 1.3, NaV 1.7, NaV 1.8, or NaV 1.9.

60. The method of any one of claims 52 to 58, wherein the synthetic RNA encoding a gene-editing protein increases expression of a wild-type or a mutant form of NaV 1.3, NaV 1.7, NaV 1.8, or NaV 1.9.

61. The method of any one of claims 51 to 60, wherein the synthetic RNA encoding a gene-editing protein increases enkephalins and/or glutamic acid decarboxylases in mesenchymal stem cells, thereby treating and/or reducing pain.

62. The method of any one of claims 51 to 61, further comprising administering electrical stimulation, a drug, and/or a cell therapy to increase efficacy.

63. The method of any one of claims 51 to 62, wherein the gene-editing protein is selected from a TALEN, a meganuclease, a nuclease, a zinc finger nuclease, a CRISPR-associated protein, CRISPR/Cas9, Cas9, xCas9, Cas12a (Cpf1), Cas13a, Cas14, CasX, CasY, a Class 1 Cas protein, a Class 2 Cas protein, and MAD7.

64. The method of any one of claims 51 to 62, wherein the gene-editing protein comprises:
(a) a DNA-binding domain comprising a plurality of repeat sequences and at least one of the repeat sequences comprises the amino acid sequence: LTPvQWAIAwxyzGHGG (SEQ ID NO: 629), wherein:
“v” is Q, D or E,
“w” is S or N,
“x” is H, N, or I,
“y” is D, A, I, N, G, H, K, S, or null, and
“z” is GGKQALETVQRLLPVLCQD (SEQ ID NO: 630) or GGKQALETVQRLLPVLCQA (SEQ ID NO: 631); and
(b) a nuclease domain comprising a catalytic domain of a nuclease.

65. The method of claim 64, wherein the nuclease domain is capable of forming a dimer with another nuclease domain.

66. The method of claim 64 or claim 65, wherein the nuclease domain comprises the catalytic domain of a protein comprising the amino acid sequence of SEQ ID NO: 632.

67. The method of any one of claims 64 to 66, wherein at least one of the repeat sequences comprising the amino acid sequence LTPvQVVAIAwxyzGHGG (SEQ ID NO: 629) is between 36 and 39 amino acids long.

68. The method of any one of claims 51 to 67, wherein the pain is post-surgical and/or chronic pain.

69. The method of any one of claims 1 to 68, wherein the synthetic RNA comprises one or more non-canonical nucleotides.

70. The method of claim 69, wherein the one or more non-canonical nucleotides avoids substantial cellular toxicity.

71. The method of any one of the above claims, wherein the non-canonical nucleotides have one or more substitutions at positions selected from the 2C, 4C, and 5C positions for a pyrimidine, or selected from the 6C, 7N and 8C positions for a purine.

72. The method of any one of the above claims, wherein the non-canonical nucleotides comprise one or more of 5-hydroxycytidine, 5-methylcytidine, 5-hydroxymethylcytidine, 5-carboxycytidine, 5-formylcytidine, 5-methoxycytidine, pseudouridine, 5-hydroxyuridine, 5-methyluridine, 5-hydroxymethyluridine, 5-carboxyuridine, 5-formyluridine, 5-methoxyuridine, 5-hydroxypseudouridine, 5-methylpseudouridine, 5-hydroxymethylpseudouridine, 5-carboxypseudouridine, 5-formylpseudouridine, and 5-methoxypseudouridine, optionally at an amount of at least 50%, or at least 60%, or at least 70%, or at least 80%, or at least 90%, or 100% of the non-canonical nucleotides.

73. The method of any one of the above claims, wherein at least about 50% of cytidine residues are non-canonical nucleotides, and which are selected from 5-hydroxycytidine, 5-methylcytidine, 5-hydroxymethylcytidine, 5-carboxycytidine, 5-formylcytidine, and 5-methoxycytidine.

74. The method of any one of the above claims, wherein at least about 75% or at least about 90% of cytidine residues are non-canonical nucleotides, and the non-canonical nucleotides are selected from 5-hydroxycytidine, 5-methylcytidine, 5-hydroxymethylcytidine, 5-carboxycytidine, 5-formylcytidine, and 5-methoxycytidine.

75. The method of any one of the above claims, wherein at least about 20% of uridine, or at least about 40%, or at least about 50%, or at least about 75%, or at about least 90% of uridine residues are non-canonical nucleotides, and the non-canonical are selected from pseudouridine, 5-hydroxyuridine, 5-methyluridine, 5-hydroxymethyluridine, 5-carboxyuridine, 5-formyluridine, 5-methoxyuridine, 5-hydroxypseudouridine, 5-methylpseudouridine, 5-hydroxymethylpseudouridine, 5-carboxypseudouridine, 5-formylpseudouridine, and 5-methoxypseudouridine.

76. The method of any one of the above claims, wherein at least about 40%, or at least about 50%, or at least about 75%, or at about least 90% of uridine residues are non-canonical nucleotides, and the non-canonical nucleotides are selected from pseudouridine, 5-hydroxyuridine, 5-methyluridine, 5-hydroxymethyluridine, 5-carboxyuridine, 5-formyluridine, 5-methoxyuridine, 5-hydroxypseudouridine, 5-methylpseudouridine, 5-hydroxymethylpseudouridine, 5-carboxypseudouridine, 5-formylpseudouridine, and 5-methoxypseudouridine.

77. The method of any one of the above claims, wherein at least about 10% of guanine residues are non-canonical nucleotides, and the non-canonical nucleotide is optionally 7-deazaguanosine.

78. The method of any one of the above claims, wherein the synthetic RNA comprises no more than about 50% 7-deazaguanosine in place of guanosine residues.

79. The method of any one of the above claims, wherein the synthetic RNA does not comprise non-canonical nucleotides in place of adenosine residues.

80. The method of any one of the above claims, wherein the synthetic RNA comprises a 5′ cap structure.

81. The method of any one of the above claims, wherein the synthetic RNA comprises a a Kozak consensus sequence.

82. The method of any one of the above claims, wherein the synthetic RNA comprises a 5′-UTR which comprises a sequence that increases RNA stability in vivo, and the 5′-UTR optionally comprises an alpha-globin or beta-globin 5′-UTR.

83. The method of any one of the above claims, wherein the synthetic RNA comprises a 3′-UTR which comprises a sequence that increases RNA stability in vivo, and the 3′-UTR optionally comprises an alpha-globin or beta-globin 3′-UTR.

84. The method of any one of the above claims, wherein the synthetic RNA comprises a 5′-UTR which comprises a microRNA binding site that modulates RNA stability in a cell type-specific manner.

85. The method of any one of the above claims, wherein the synthetic RNA comprises a 3′-UTR which comprises a microRNA binding site that modulates RNA stability in a cell type-specific manner.

86. The method of any one of the above claims, wherein the synthetic RNA comprises a 3′ poly(A) tail.

87. The method of any one of the above claims, wherein the synthetic RNA comprises a 3′ poly(A) tail which comprises from about 20 nucleotides to about 250 nucleotides.

88. The method of any one of the above claims, wherein the synthetic RNA comprises about 200 nucleotides to about 5000 nucleotides.

89. The method of any one of the above claims, wherein the synthetic RNA comprises from about 500 to about 2000 nucleotides, or about 500 to about 1500 nucleotides, or about 500 to about 1000 nucleotides.

90. The method of any one of the above claims, wherein the synthetic RNA is prepared by in vitro transcription.

91. The method of any one of the above claims, wherein the effective amount of the synthetic RNA is administered as one or more injections each injection comprising about 10 ng to about 5000 ng of RNA.

92. The method of any one of the above claims, wherein the effective amount of the synthetic RNA is administered as one or more injections each injection comprising no more than about 10 ng, or no more than about 20 ng, or no more than about 50 ng, or no more than about 100 ng, or no more than about 200 ng, or no more than about 300 ng, or no more than about 400 ng, or no more than about 500 ng, or no more than about 600 ng, or no more than about 700 ng, or no more than about 800 ng, or no more than about 900 ng, or no more than about 1000 ng, or no more than about 1100 ng, or no more than about 1200 ng, or no more than about 1300 ng, or no more than about 1400 ng, or no more than about 1500 ng, or no more than about 1600 ng, or no more than about 1700 ng, or no more than about 1800 ng, or no more than about 1900 ng, or no more than about 2000 ng, or no more than about 3000 ng, or no more than about 4000 ng, or no more than about 5000 ng of RNA.

93. The method of any one of the above claims, wherein the effective amount of the synthetic RNA is administered as one or more injections each injection comprising about 10 ng, or about 20 ng, or about 50 ng, or about 100 ng, or about 200 ng, or about 300 ng, or about 400 ng, or about 500 ng, or about 600 ng, or about 700 ng, or about 800 ng, or about 900 ng, or about 1000 ng, or about 1100 ng, or about 1200 ng, or about 1300 ng, or about 1400 ng, or about 1500 ng, or about 1600 ng, or about 1700 ng, or about 1800 ng, or about 1900 ng, or about 2000 ng, or about 3000 ng, or about 4000 ng, or about 5000 ng of RNA.

94. The method of any one of the above claims, wherein the effective amount of the synthetic RNA comprises one or more lipids and/or polymers to enhance uptake of RNA by cells.

95. The method of any one of the above claims, wherein the effective amount of the synthetic RNA comprises a cationic liposome and/or cationic polymer formulation.

96. The method of claim 95, wherein a lipid and/or a polymer of the cationic liposome formulation is selected from Table 1.

97. A method of polynucleotide delivery to the central nervous system, comprising a synthetic polynucleotide formulated with a liposome comprising one or more lipids selected from Table 1.

98. The method of claim 97, wherein the polynucleotide is a synthetic RNA.

99. The method of claim 97 or claim 98, wherein the liposome comprises 1,2-dioleoyl-3-dimethylammonium-propane (DODAP).

100. The method of claim 99, wherein the liposome further comprises one or more helper lipids, optionally selected from dioleoyl phosphatidyl ethanolamine (DOPE), 1,2-distearoyl-sn-glycero-3-phosphocholine (DSPC), and cholesterol.

101. The method of claim 99 or claim 100, wherein the liposome further comprises a PEGylated lipid.

102. The method of any one of the above claims, wherein the subject in need is a human.

103. The method of any one of the above claims, wherein the effective amount of the synthetic RNA is administered about weekly, for at least 2 weeks.

104. The method of any one of the above claims, wherein the effective amount of the synthetic RNA is administered about every other week for at least one month.

105. The method of any one of the above claims, wherein the effective amount of the synthetic RNA is administered monthly or about every other month.

106. The method of any one of the above claims, wherein the effective amount of the synthetic RNA is administered for at least two months, or at least 4 months, or at least 6 months, or at least 9 months, or at least one year.

107. The method of any one of the above claims, wherein the synthetic RNA comprises 5-methoxyuridine.

108. A composition comprising an effective amount of the synthetic RNA used in the method of any one of the above claims.

109. The composition of claim 108 having an injection volume of less than about 1 mL, less than about 0.5 mL, less than about 0.2 mL, less than about 0.1 mL, less than about 0.05 mL, less than about 0.02 mL, less than about 0.01 mL, less than about 0.005 mL, less than about 0.002 mL, or less than about 0.001 mL.

110. A pharmaceutical composition, comprising the composition of claim 108 or claim 109 and a pharmaceutically-acceptable excipient.

111. Use of the composition of claim 108 or claim 109 or the pharmaceutical composition of claim 110 in the treatment of a disease or disorder described herein.

112. Use of the composition of claim 108 or claim 109 or the pharmaceutical composition of claim 110 in the manufacture of a medicament for the treatment of a disease or disorder described herein.

113. A composition comprising a synthetic RNA used in the method of any one of claims 1 to 106 and formulated with one or more lipids and/or polymers selected from Table 1.

114. A composition comprising a DNA template comprising: (a) a sequence encoding a protein, (b) a tail region comprising deoxyadenosine nucleotides and one or more other nucleotides, and (c) a restriction enzyme binding site.

115. The composition of claim 114, wherein the one or more other nucleotides comprises deoxyguanosine residues.

116. The composition of claim 115, wherein the tail region comprises about 1%, about 2%, about 5%, about 10%, about 15%, about 20%, about 25%, about 30%, about 35%, about 40%, about 45%, or about 50% deoxyguanosine residues.

117. The composition of claim 115, wherein the tail region comprises more than 50% deoxyguanosine residues.

118. The composition of claim 114, wherein the one or more other nucleotides comprises deoxycytidine residues.

119. The composition of claim 118, wherein the tail region comprises about 1%, about 2%, about 5%, about 10%, about 15%, about 20%, about 25%, about 30%, about 35%, about 40%, about 45%, or about 50% deoxycytidine residues.

120. The composition of claim 118, wherein the tail region comprises more than 50% deoxycytidine residues.

121. The composition of claim 114, wherein the one or more other nucleotides comprises deoxythymidine residues.

122. The composition of claim 121, wherein the tail region comprises about 1%, about 2%, about 5%, about 10%, about 15%, about 20%, about 25%, about 30%, about 35%, about 40%, about 45%, or about 50% deoxythymidine residues.

123. The composition of claim 122, wherein the tail region comprises more than 50% deoxythymidine residues.

124. The composition of claim 114, wherein the one or more other nucleotides comprise deoxyguanosine residues and deoxycytidine residues.

125. The composition of any one of claims 114 to 124, wherein the tail region comprises about 99%, about 98%, about 95%, about 90%, about 85%, about 80%, about 75%, about 70%, about 65%, about 60%, about 55%, or about 50% deoxyadenosine residues.

126. The composition of any one of claims 114 to 124, wherein the tail region comprises fewer than 50% deoxyadenosine residues.

127. The composition of any one of claims 114 to 126, wherein the length of the tail region is between about 80 base pairs and about 120 base pairs, about 120 base pairs and about 160 base pairs, about 160 base pairs and about 200 base pairs, about 200 base pairs and about 240 base pairs, about 240 base pairs and about 280 base pairs, or about 280 base pairs and about 320 base pairs.

128. The composition of any one of claims 114 to 126, wherein the length of the tail region is greater than 320 base pairs.

129. A composition comprising a synthetic RNA comprising: (a) a sequence encoding a protein, and (b) a tail region comprising adenosine nucleotides and one or more other nucleotides.

130. The composition of claim 129, wherein the one or more other nucleotides comprises guanosine residues.

131. The composition of claim 130, wherein the tail region comprises about 1%, about 2%, about 5%, about 10%, about 15%, about 20%, about 25%, about 30%, about 35%, about 40%, about 45%, or about 50% guanosine residues.

132. The composition of claim 130, wherein the tail region comprises more than 50% guanosine residues.

133. The composition of claim 129, wherein the one or more other nucleotides comprises cytidine residues.

134. The composition of claim 133, wherein the tail region comprises about 1%, about 2%, about 5%, about 10%, about 15%, about 20%, about 25%, about 30%, about 35%, about 40%, about 45%, or about 50% cytidine residues.

135. The composition of claim 133, wherein the tail region comprises more than 50% cytidine residues.

136. The composition of claim 129, wherein the one or more other nucleotides comprises uridine residues.

137. The composition of claim 136, wherein the tail region comprises about 1%, about 2%, about 5%, about 10%, about 15%, about 20%, about 25%, about 30%, about 35%, about 40%, about 45%, or about 50% uridine residues.

138. The composition of claim 136, wherein the tail region comprises more than 50% uridine residues.

139. The composition of claim 129, wherein the one or more other nucleotides comprise guanosine residues and cytidine residues.

140. The composition of any one of claims 129 to 139, wherein the tail region comprises about 99%, about 98%, about 95%, about 90%, about 85%, about 80%, about 75%, about 70%, about 65%, about 60%, about 55%, or about 50% adenosine residues.

141. The composition of any one of claims 129 to 139, wherein the tail region comprises fewer than 50% adenosine residues.

142. The composition of any one of claims 129 to 141, wherein the length of the tail region is between about 80 nucleotides and about 120 nucleotides, about 120 nucleotides and about 160 nucleotides, about 160 nucleotides and about 200 nucleotides, about 200 nucleotides and about 240 nucleotides, about 240 nucleotides and about 280 nucleotides, or about 280 nucleotides and about 320 nucleotides.

143. The composition of any one of claims 129 to 141, wherein the length of the tail region is greater than 320 nucleotides.

144. A composition comprising a synthetic RNA comprising a 3′-untranslated region sequence having at least 90% homology to the 3′-untranslated region of a gene selected from: APOBEC3H, CD52, DMC1, EIF3E, GPR160, and RPS24.

145. The composition of any one of claims 129 to 144, wherein the synthetic RNA further comprises one or more non-canonical nucleotides.

146. The composition of claim 145, wherein the non-canonical nucleotides have one or more substitutions at positions selected from the 2C, 4C, and 5C positions for a pyrimidine, or selected from the 6C, 7N and 8C positions for a purine.

147. The composition of claim 145 or claim 146, wherein the non-canonical nucleotides comprise one or more of 5-hydroxycytidine, 5-methylcytidine, 5-hydroxymethylcytidine, 5-carboxycytidine, 5-formylcytidine, 5-methoxycytidine, pseudouridine, 5-hydroxyuridine, 5-methyluridine, 5-hydroxymethyluridine, 5-carboxyuridine, 5-formyluridine, 5-methoxyuridine, 5-hydroxypseudouridine, 5-methylpseudouridine, 5-hydroxymethylpseudouridine, 5-carboxypseudouridine, 5-formylpseudouridine, and 5-methoxypseudouridine, optionally at an amount of at least 50%, or at least 60%, or at least 70%, or at least 80%, or at least 90%, or 100% of the non-canonical nucleotides.

148. The composition of any one of claims 145 to 147, wherein at least about 50% of cytidine residues are non-canonical nucleotides, and which are selected from 5-hydroxycytidine, 5-methylcytidine, 5-hydroxymethylcytidine, 5-carboxycytidine, 5-formylcytidine, and 5-methoxycytidine.

149. The composition of any one of claims 145 to 148, wherein at least about 75% or at least about 90% of cytidine residues are non-canonical nucleotides, and the non-canonical nucleotides are selected from 5-hydroxycytidine, 5-methylcytidine, 5-hydroxymethylcytidine, 5-carboxycytidine, 5-formylcytidine, and 5-methoxycytidine.

150. The composition of any one of claims 145 to 149, wherein at least about 20% of uridine, or at least about 40%, or at least about 50%, or at least about 75%, or at about least 90% of uridine residues are non-canonical nucleotides, and the non-canonical are selected from pseudouridine, 5-hydroxyuridine, 5-methyluridine, 5-hydroxymethyluridine, 5-carboxyuridine, 5-formyluridine, 5-methoxyuridine, 5-hydroxypseudouridine, 5-methylpseudouridine, 5-hydroxymethylpseudouridine, 5-carboxypseudouridine, 5-formylpseudouridine, and 5-methoxypseudouridine.

151. The composition of any one of claims 145 to 150, wherein at least about 40%, or at least about 50%, or at least about 75%, or at about least 90% of uridine residues are non-canonical nucleotides, and the non-canonical nucleotides are selected from pseudouridine, 5-hydroxyuridine, 5-methyluridine, 5-hydroxymethyluridine, 5-carboxyuridine, 5-formyluridine, 5-methoxyuridine, 5-hydroxypseudouridine, 5-methylpseudouridine, 5-hydroxymethylpseudouridine, 5-carboxypseudouridine, 5-formylpseudouridine, and 5-methoxypseudouridine.

152. The composition of any one of claims 145 to 151, wherein at least about 10% of guanine residues are non-canonical nucleotides, and the non-canonical nucleotide is optionally 7-deazaguanosine.

153. The composition of any one of claims 145 to 152, wherein the synthetic RNA comprises no more than about 50% 7-deazaguanosine in place of guanosine residues.

154. The composition of any one of claims 145 to 153, wherein the synthetic RNA does not comprise non-canonical nucleotides in place of adenosine residues.

155. The composition of any one of claims 129 to 154, wherein the synthetic RNA comprises 5-methoxyuridine.
